(19) United States
(12) Patent Application Publication
(10) Pub. No.: US 2023/0114801 A1
(43) Pub. Date: Apr. 13, 2023

(54) MINIATURE GUIDANCE AND NAVIGATION CONTROL (miniGNC) ANTIBODY-LIKE PROTEINS AND METHODS OF MAKING AND USING THEREOF

(71) Applicants: SYSTIMMUNE, INC., Reamond, WA (US); BAILI-BIO (CHENGDU) PHARMACEUTICAL CO., LTD., Chengdu, Sichuan (CN)

(72) Inventors: Yi Zhu, Redmond, WA (US); Soumili Chatterjee, Bothell, WA (US); Dennis R. Goulet, Redmond, WA (US); Tsung-I Tsai, Redmond, WA (US); Blair Renshaw, Renton, WA (US); Christopher G. Vincent, Lynnwood, WA (US); Andrew Waight, Kenmore, WA (US); Nga Sze Amanda Mak, Mukilteo, WA (US)

(21) Appl. No.: 17/909,360

(22) PCT Filed: Mar. 17, 2021
(86) PCT No.: PCT/US21/22847

§ 371 Date: Sep. 3, 2022

Related U.S. Application Data
(60) Provisional application No. 62/991,042, filed on Mar. 17, 2020.

(51) Int. Cl. C07K 16/30; C07K 16/28; C07K 16/32

(52) U.S. Cl. CPC C07K 16/30; C07K 16/2803; C07K 16/2809; C07K 16/2851; C07K 16/2863; C07K 16/3007; C07K 16/32; A61K 2039/507

(57) ABSTRACT

A multi-specific antibody-like protein having a first monomer comprising a first binding monomer, a CH1 domain, a first hinge, a first CH2 domain, and a first CH3 domain, a second monomer comprising a second binding monomer, a CL domain, a second hinge, a second CH2 domain, and a second CH3 domain, wherein the first binding monomer and a second binding monomer are configured to form a dimer, wherein the first monomer and the second monomer are covalently paired through at least one disulfide bond between the CH1 domain and the CL domain and at least one disulfide bond between the first hinge and the second hinge, wherein the first monomer and second monomer may comprise optionally a first binding domain (D1) and a second binding domain (D2), and a fourth binding domain (D4) and a fifth binding domain (D5), and wherein the multi-specific antibody-like protein is at least bi-specific.

### CROSS REFERENCE TO RELATED APPLICATIONS

[0001] This application claims the benefit of the filing date of U.S. Provisional Application Ser. No. 62/991,042 filed Mar. 17, 2020 under 35 U.S.C. 119(e), the entire disclosures of which are incorporated by reference herein.

### TECHNICAL FIELD

[0002] The present application generally relates to the technical field of multi-specific antibody for cancer immunotherapy and more particularly relates to making and using miniature Guidance and Navigation Control (miniGNC) antibodies with multiple binding activities against surface molecules of both immune cells and tumor cells.

### BACKGROUND

[0003] Therapeutic antibodies have become a mainstay in treatment of several diseases, including but not limited to cancer, infection, and autoimmunity. While monoclonal, monospecific antibodies provide a straightforward mechanism to treat disease, e.g., via inhibition or activation of specific signalling pathways, multi-specific antibodies allow more complex therapeutic mechanisms to be explored. By targeting multiple distinct antigens, or multiple epitopes within a single antigen, biological responses such as cell colocalization and activation can be elicited, which enables, for example, the redirection of T cells and other immune cells to the site of specific antigen-expressing tumor cells. In this way, bispecific and multi-specific antibodies have become important platforms in the field of immunooncology.

[0004] Due to the advantages of multi-specific antibody platforms, many such frameworks have been developed. One such platform is known as Guidance and Navigation Control (GNC). The GNC proteins include the proteins linking multiple functionally independent binding moieties into a single entity that is capable of bringing both effector cells and target cells together (see Applicant's applications, WO/2019/005641, WO2019191120, and PCT/US20/59230, incorporated herein in its entirety). In general, these platforms are restricted to at least two specificities, preventing the exploration of complex therapeutic mechanisms that require binding to more than two antigens. For antibody platforms with more than two specificities, the increased number of binding domains usually necessitates formation of large molecules which often have undesirable physical and biological properties. The increase in molecular weight can reduce developability, as larger and more complex molecules are more likely to have problems with aggregation and solubility. Furthermore, the ability of large macromolecules to penetrate into solid tumors may be hindered compared to proteins of smaller size. Thus, there is a need for multi-specific antibody platforms with more than two specificities that are not significantly larger than monoclonal IgG antibodies.

### SUMMARY

[0005] The following summary is illustrative only and is not intended to be in any way limiting. In addition to the illustrative aspects, embodiments, and features described above, further aspects, embodiments, and features will become apparent by reference to the drawings and the following detailed description.

[0006] The application provides proteins with binding specificities such as multi-specific protein like antibodies including multi-specific antibodies, and the fragments of these binding proteins including without limitation scFv domain, Fab region, Fc domain, VH, VL, light chains, heavy chains, variable regions, and complementary determining region (CDR). The application further provides method of making and using the antibody-like proteins disclosed herein.

[0007] In one aspect, the application provides multi-specific antibody-like proteins. In one embodiment, the multi-specific antibody-like protein having a N-terminus and a C-terminus, including, a first monomer, including, from the N-terminus to the C-terminus, a first binding monomer, a CH1 domain, a first hinge, a first CH2 domain, and a first CH3 domain, wherein the first monomer may comprise optionally a first binding domain (D1) linked to the N-terminus, a fourth binding domain (D4) linked to the C-terminus, or both, a second monomer, including, from the N-terminus to the C-terminus, a second binding monomer, a CL domain, a second hinge, a second CH2 domain, and a second CH3 domain, wherein the second monomer may comprise optionally a second binding domain (D2) linked to the N-terminus, a fifth binding domain (D5) linked to the C-terminus, or both, wherein the first binding monomer and a second binding monomer are configured to form a dimer, wherein the first monomer and the second monomer are covalently paired through at least one disulfide bond between the CH1 domain and the CL domain and at least one disulfide bond between the first hinge and the second hinge, and wherein the multi-specific antibody-like protein is at least bi-specific.

[0008] In one embodiment, the multi-specific antibody-like protein may be tri-specific, tetra-specific, or penta-specific. In one embodiment, the multi-specific antibody-like protein may be monoclonal antibodies. In one embodiment, the multi-specific antibody-like protein may be purified monoclonal antibody. In one embodiment, the multi-specific antibody-like protein may be humanized antibodies.

[0009] In one embodiment, the multi-specific antibody-like protein may further comprise a disulfide bond between the first CH3 domain and a second CH3 domain.

[0010] In one embodiment, the multi-specific antibody-like protein may further comprise a second disulfide bond between the first hinge and the second hinge.

[0011] In one embodiment, connecting linkers are used between various domains. In one embodiment, the connecting linker may comprise a (GₓS_{y}), linker, wherein n, x, and y each independently is an integer from 1 to 10. In one embodiment, D1, D2, D4 or D5 are liked to N- or C-terminus through a linker. In one embodiment, the linker may comprise a (GₓS_{y}), linker. n, x, and y each independently may be an integer from 1 to 10. In one embodiment, n is 1, 2, 3, 4, 5, 6, 7, 8, 9 and 10. In one embodiment, x is 1, 2, 3, 4, 5, 6, 7, 8, 9 and 10. In one embodiment, y is 1, 2, 3, 4, 5, 6, 7, 8, 9 and 10.

[0012] In one embodiment, the first CH3 domain is configured to form a hole structure, wherein the second CH3 domain is configured to form a knob structure, and wherein the first CH2 and CH3 domains and the second CH2 and CH3 domains are configured to heterodimerize to form a complementary Fc domain.

[0013] In one embodiment, the first CH3 domain may comprise at least one ‘hole’ mutation at T366S, L368A or Y407V and the second CH3 domain may comprise a ‘knob’ mutation at T366W.

[0014] In one embodiment, the Fc domain may comprise mutations at H435R/Y436F.

[0015] In one embodiment, the Fc domain is engineered to eliminate effector cell functions selected from ADCC, ADCP, or CDC.

[0016] In one embodiment, the Fc domain may comprise at least one mutation at L234A, L235A, G237A, K322A (Eu numbering). In one embodiment, the Fc region comprise mutations at L234A/L235A/G237A/K322A. In one embodiment, the Fc region comprise mutations at L234A/L235A/K322A (Eu numbering). In one embodiment, the Fc domain comprise null mutation. In one embodiment, the IgG4 Fc domain comprises the mutation S228P (Eu numbering). In one embodiment, the IgG4 Fc domain comprises the mutations S228P/F234A/L234A (Eu numbering).

[0017] In one embodiment, the heavy chain constant sequence may be derived from IgG1 or IgG4.

[0018] In one embodiment, the Fc domain may include an amino acid sequence having at least 50%, 60%, 70%, 75%, 80%, 85%, 90%, 95%, 97%, 98%, 99%, or 100% identity to SEQ ID NO. 313 or 314.

[0019] In one embodiment, the first binding monomer may comprise a VH domain, a second binding monomer may comprise a VL domain, and the VH, CH1, VL, CL domains form a Fab region as a third binding domain (D3). In one embodiment, the Fab region may comprise a disulfide bond between VH-44C and VL 100C.

[0020] In one embodiment, the first binding monomer and the second binding monomer form a NKG2D receptor as a third binding domain (D3).

[0021] In one embodiment, the D1, D2, D4, and D5 is independently a scFv domain, a VHH domain, a receptor, or a ligand.

[0022] In one embodiment, the scFv domain may have a VH domain linked to a VL domain. In one embodiment, the scFv domain have may have VH-VL orientation. In one embodiment, the scFv domain have a VL-VH orientation.

[0023] In one embodiment, the scFv domain may comprise a disulphide bond between VL and VH. In one embodiment, the disulfide bond is between VL100 and VH44 of the scFv domain. In one embodiment, the scFv domain may comprise the mutation R19S in the VH.

[0024] In one embodiment, the VHH domain may comprise the mutation R19S in the VH or VHH.

[0025] In one embodiment, at least one, two, or three of D1, D2, D4, and D5 may be scFv. In one embodiment, all of D1, D2, D4, and D5 may be scFv.

[0026] In one embodiment, at least one, two, or three of D1, D2, D4, and D5 may be a VHH domain. In one embodiment, all of D1, D2, D4, and D5 may be VHH domains.

[0027] In one embodiment, at least one, two, or three of D1, D2, D4, and D5 may be a receptor. In one embodiment, all of D1, D2, D4, and D5 may be receptors.

[0028] In one embodiment, at least one, two, or three of D1, D2, D4, and D5 may be a ligand. In one embodiment, all of D1, D2, D4, and D5 may be ligands.

[0029] In one embodiment, the D1, D2, D3, D4, and D5 each independently may have a binding specificity against an antigen selected from a T cell activating receptor, an immune cell binding receptor, an immune checkpoint molecule, a co-stimulation factor, a receptor of a leukocyte, a tumor antigen, a tumor associated antigen (TAA), a receptor of a tissue cell, a receptor of a cancer cell, or a combination thereof.

[0030] In one embodiment, the binding domain for T cell activating receptor is adjacent to the binding domain for the tumor associated antigen (TAA).

[0031] In one embodiment, T cell activating receptor may comprise CD3.

[0032] In one embodiment, an immune checkpoint receptor may comprise PD-L1, PD-1, TIGIT, TIM-3, LAG-3, CTLA4, BTLA, VISTA, PD-L2, CD160, LOX-1, siglec-15, CD47, HVEM SIRPα CSF1R, CD73, Siglec-15, CD47 or a combination thereof.

[0033] In one embodiment, a co-stimulating receptor may comprise 4-1BB, CD28, OX40, GITR, CD40L, CD40, ICOS, LIGHT, CD27, CD30, or a combination thereof.

[0034] In one embodiment, a tumor associated antigen may comprise EGFR, HER2, HER3, EGRFVIII, CD19, BCMA, CD20, CD33, CD123, CD22, CD30, ROR1, CEA, LMP1, LMP2A, Mesothelin, PSMA, EpCAM, glypican-3, gpA33, GD2, TROP2, NKG2D ligand, CD39, CLDN18.2, DLL3, HLA-G, FcRH5, GPRC5D, LIV-1, MUC1, CD138, CD70, uPAR, CD38 or a combination thereof.

[0035] In one embodiment, the D1, D2, D3, D4, and D5 each independently may have a binding specificity against an antigen selected, EGFR, HER2, HER3, EGFRvIII, ROR1, CD3, CD28, CEA, LMP1, LMP2A, Mesothelin, PSMA, EpCAM, glypican-3, gpA33, GD2, TROP2, NKG2D, NKG2D ligand, BCMA, CD19, CD20, CD33, CD123, CD22, CD30, PD-L1, PD1, OX40, 4-1BB, GITR, TIGIT, TIM-3, LAG-3, CTLA4, CD40, CD40L, VISTA, ICOS, BTLA, LIGHT, HVEM, CSF1R, CD73, CD39, CLDN18.2, DLL3, HLA-G, FcRH5, GPRC5D, LIV-1, MUC1, CD138, CD70, CD16, uPAR, Siglec-15, CD47, CD38, NKp46, PD-L2, CD160, LOX-1, SIRPα CD27 and the Fc domain may comprise a human IgG Fc domain.

[0036] In one embodiment, D1 may have a binding specificity to CD3, CD20, CEA, HER2, EGFR or NKG2D ligand. In one embodiment, D2 may have a binding specificity to HER3, EGFR, CD3, or CD19. In one embodiment, D3 may have a binding specificity to HER3, EGFR, CD3, or NKG2D ligands. In one embodiment, D4 may have a binding specificity to 4-1BB, or EGFR. In one embodiment, D5 may have a binding specificity to PD-L1 or HER3.

[0037] In one embodiment, D1 may have a binding specificity to CD3, D2 may have a binding specificity to HER3, D3 may have a binding specificity to EGFR, D4 may have a binding specificity to 4-1BB, and D5 may have a binding specificity to PD-L1.

[0038] In one embodiment, D1 may have a binding specificity to EGFR, D2 may have a binding specificity to HER3, D3 may have a binding specificity to CD3, D4 may have a binding specificity to 4-1BB, and D5 may have a binding specificity to PD-L1.

[0039] In one embodiment, D1 may have a binding specificity to EGFR, D2 may have a binding specificity to CD3, D3 may have a binding specificity to HER3, D4 may have a binding specificity to 4-1BB, and D5 may have a binding specificity to PD-L1.

[0040] In one embodiment, D1 may have a binding specificity to CD3 or EGFR, D2 may have a binding specificity to CD19, D3 may have a binding specificity to CD3 or EGFR, D4 may have a binding specificity to 4-1BB, and D5 may have a binding specificity to PD-L1.

[0041] In one embodiment, D1 and D4 each may have a binding specificity to EGFR, D2 and D5 each may have a binding specificity to HER3, and D3 may have a binding specificity to CD3.

[0042] In one embodiment, D1 may have a binding specificity to CD20, D2 may have a binding specificity to CD19, D3 may have a binding specificity to CD3, D4 may have a binding specificity to 4-1BB, and D5 may have a binding specificity to PD-L1.

[0043] In one embodiment, D1 may have a binding specificity to NKG2D ligand, D2 may have a binding specificity to CD19, D3 may have a binding specificity to CD3, D4 may have a binding specificity to 4-1BB, and D5 may have a binding specificity to PD-L1.

[0044] In one embodiment, D1 may have a binding specificity to CD3, and D3 may comprise a NKG2D receptor. In one embodiment, the protein may further comprise D2 having a binding specificity to CD19. In one embodiment, the protein may further comprise D5 having a binding specificity to PD-L1. In one embodiment, the protein may further comprise D4 having a binding specificity to 4-1BB.

[0045] In one embodiment, the multi-specific antibody-like protein is bi-specific. In one embodiment, D2 may have a binding specificity to HER3, D3 may have a binding specificity to CD3. In one embodiment, D1 may have a binding specificity to HER2, D3 may have a binding specificity to CD3. In one embodiment, D1 may have a binding specificity to EGFR, D3 may have a binding specificity to CD3. In one embodiment, D3 may have a binding specificity to CD3, D5 may have a binding specificity to HER3. In one embodiment, D3 may have a binding specificity to CD3, D4 may have a binding specificity to EGFR.

[0046] In one embodiment, the bi-specific antibody-like protein may include an amino acid sequence having at least 50%, 60%, 70%, 75%, 80%, 85%, 90%, 95%, 97%, 98%, 99%, or 100% identity to SEQ ID NO. 1 and 3; 5 and 7; 9 and 11; 13 and 15; 53 and 55; 57 and 59; 113 and 115; 117 and 119; 121 and 123; 125 and 127; 157 and 159; 297 and 299; or 199 and 201.

[0047] In one embodiment, the multi-specific antibody-like protein is tri-specific. In one embodiment, D1 may have a binding specificity to EGFR, D2 may have a binding specificity to HER3, D3 may have a binding specificity to CD3. In one embodiment, D1 may have a binding specificity to CEA, D2 may have a binding specificity to EGFR, D3 may have a binding specificity to CD3. In one embodiment, D3 may have a binding specificity to CD3, D4 may have a binding specificity to EGFR, D5 may have a binding specificity to HER3. In one embodiment, the antibody is a tri-specific antibody having the binding specificity to EGFR, HER3, and CD3. In one embodiment, the tri-specific antibody-like protein may include an amino acid sequence having at least 50%, 60%, 70%, 75%, 80%, 85%, 90%, 95%, 97%, 98%, 99%, or 100% identity to SEQ ID NO. 41 and 43; 45 and 47; 49 and 51; 101 and 103; 105 and 107; 109 and 111; 195 and 197; 137 and 139; or 161 and 163.

[0048] In one embodiment, the multi-specific antibody-like protein is tetra-specific. In one embodiment, D1 may have a binding specificity to EGFR, D2 may have a binding specificity to HER3, D3 may have a binding specificity to CD3, D4 may have a binding specificity to 4-1BB. In one embodiment, D1 may have a binding specificity to EGFR, D2 may have a binding specificity to HER3, D3 may have a binding specificity to CD3, D5 may have a binding specificity to PD-L1. the antibody is a tetra-specific antibody having the binding specificity to EGFR, HER3, CD3, and 4-1BB. the antibody is a tetra-specific antibody having the binding specificity to EGFR, HER3, CD3, and PD-L1. In one embodiment, the tetra-specific antibody-like protein may include an amino acid sequence having at least 50%, 60%, 70%, 75%, 80%, 85%, 90%, 95%, 97%, 98%, 99%, or 100% identity to SEQ ID NO. 33 and 35; 37 and 39; 141 and 143; 145 and 147; or 165 and 167.

[0049] In one embodiment, the antibody is penta-specific. In one embodiment, the antibody-like protein may have the binding specificity to EGFR, HER3, CD3, 4-1BB and PD-L1. In one embodiment, the penta-specific antibody-like protein may include an amino acid sequence having at least 50%, 60%, 70%, 75%, 80%, 85%, 90%, 95%, 97%, 98%, 99%, or 100% identity to SEQ ID NO. 17 and 19; 21 and 23; 25 and 27; 29 and 31; 69 and 71; 73 and 75; 77 and 79; 81 and 83; 85 and 87; 89 and 91; 93 and 95; 97 and 99; 129 and 131; 133 and 135; 149 and 151; 169 and 171; 173 and 175; or 177 and 179.

[0050] In a second aspect, the application provides novel sequences for complimentary determining regions (CDRs). In one embodiment, the application provides proteins, antibody-like proteins or antibodies comprising the CDRs as disclosed herein.

[0051] In one embodiment, the CDRs may have an affinity to CEA. In one embodiment, the CDRs may have an equilibrium dissociation constant (KD) to CEA, wherein the KD is not more than 0.1 nM, 2 nM, 5 nM, 10 nM, 20 nM, 30 nM or 50 nM. In one embodiment, the CDR may include an amino acid sequence having at least 80% sequence identity to SEQ ID NO. 301, 302, 303, 304, 305, or 306.

[0052] In one embodiment, the application provides a protein having an affinity to CEA. In one embodiment, the protein may have a CDR H1 having an amino acid sequence having at least 80% sequence identity to SEQ ID NO. 301. In one embodiment, the protein may have a CDR H2 having an amino acid sequence having at least 80% sequence identity to SEQ ID NO. 302. In one embodiment, the protein may have a CDR H3 having an amino acid sequence having at least 80% sequence identity to SEQ ID NO. 303. In one embodiment, the protein may have a CDR L1 having an amino acid sequence having at least 80% sequence identity to SEQ ID NO. 314. In one embodiment, the protein may have a CDR L2 having an amino acid sequence having at least 80% sequence identity to SEQ ID NO. 305. In one embodiment, the protein may have a CDR L3 having an amino acid sequence having at least 80% sequence identity to SEQ ID NO. 306. In one embodiment, the protein may include an amino acid sequence having at least 50%, 60%, 70%, 75%, 80%, 85%, 90%, 95%, 97%, 98%, 99%, or 100% sequence identity to an amino acid sequence selected from SEQ ID NO. 279, 280, 281 or 282. In one embodiment, the protein may include an amino acid sequence having at least 50%, 60%, 70%, 75%, 80%, 85%, 90%, 95%, 97%, 98%, 99%, or 100% sequence identity to an amino acid sequence selected from SEQ ID NO. 279, 280, 281 or 282.

[0053] In one embodiment, the application provides a multi-specific antibody-like protein having a variable region, wherein the variable region may comprise an amino acid sequence selected from SEQ ID NO. 301, 302, 303, 304, 305, or 306.

[0054] In one embodiment, the CDRs may have an affinity to CD3. In one embodiment, the CDR may have an equilibrium dissociation constant (KD) to CD3, wherein the KD is not more than 10 nM, 20 nM, 30 nM or 50 nM, 100 nM, 200 nM, 300 nM, 400 nM or 500 nM. In one embodiment, the CDR may include an amino acid sequence having at least 80% sequence identity to SEQ ID NO. 307, 308, 309, 310, 311 or 312.

[0055] In one embodiment, the protein having an affinity to CD3 includes CDR H1 having an amino acid sequence having at least 80% sequence identity to SEQ ID NO. 307. In one embodiment, the protein having an affinity to CD3 includes CDR H2 having an amino acid sequence having at least 80% sequence identity to SEQ ID NO. 308. In one embodiment, the protein having an affinity to CD3 includes CDR H3 having an amino acid sequence having at least 80% sequence identity to SEQ ID NO. 309. In one embodiment, the protein having an affinity to CD3 includes CDR L1 having an amino acid sequence having at least 80% sequence identity to SEQ ID NO. 310. In one embodiment, the protein having an affinity to CD3 includes CDR L2 having an amino acid sequence having at least 80% sequence identity to SEQ ID NO. 311. In one embodiment, the protein having an affinity to CD3 includes CDR L3 having an amino acid sequence having at least 80% sequence identity to SEQ ID NO. 312.

[0056] In one embodiment, the protein may comprise an amino acid sequence having at least 50%, 60%, 70%, 75%, 80%, 85%, 90%, 95%, 97%, 98%, 99%, or 100% sequence identity to an amino acid sequence selected from SEQ ID NO. 227-230, 231-234, 235-238, 239-242 and 291-294. In one embodiment, the multi-specific antibody-like protein may comprise an amino acid sequence having at least 50%, 60%, 70%, 75%, 80%, 85%, 90%, 95%, 97%, 98%, 99%, or 100% sequence identity to an amino acid sequence selected from SEQ ID NO. 227-230, 231-234, 235-238, 239-242 and 291-294.

[0057] In one embodiment, the multi-specific antibody-like protein may have a variable region wherein the variable region may comprise an amino acid sequence selected from SEQ ID 307, 308, 309, 310, 311 or 312.

[0058] In a further aspect, the application provides isolated nucleic acid sequences encoding the multi-specific antibody-like proteins, fragments, domains, regions as disclosed herein.

[0059] In a further aspect, the application provides expression vectors including the isolated nucleic acid sequences as disclosed herein.

[0060] In a further aspect, the application provides host cells including the isolated nucleic acid sequences as disclosed herein. In one embodiment, the host cell includes the expression vector as disclosed herein. In one embodiment, the host cell may be a prokaryotic cell or a eukaryotic cell.

[0061] In a further aspect, the application provides methods for producing the multi-specific antibody like proteins as disclosed herein. In one embodiment, the method includes the steps of culturing a host cell such that the DNA sequence encoding the multi-specific antibody-like protein is expressed, and purifying said multi-specific antibody. In one embodiment, the method includes the steps of culturing a host cell under conditions wherein said multi-specific antibody-like proteins are produced and recovering said antibody-like protein.

[0062] In a further aspect, the application provides immunoconjugates. In one embodiment, the immunoconjugate may include the multi-specific antibody-like proteins linked to a cytotoxic agent, an imaging agent, or both.

[0063] In a further aspect, the application provides pharmaceutical compositions. In one embodiment, the pharmaceutical composition may include the multi-specific antibody-like protein and a pharmaceutically acceptable carrier. In one embodiment, the pharmaceutical composition may further include radioisotope, radionuclide, a toxin, a therapeutic agent, a chemotherapeutic agent or a combination thereof. In one embodiment, the pharmaceutical composition may include the immunoconjugate as disclosed thereof and a pharmaceutically acceptable carrier.

[0064] In a further aspect, the application provides methods for treating or preventing a cancer, an autoimmune disease, or an infectious disease in a subject. In one embodiment, the method may include the steps of administering to the subject a pharmaceutical composition including a purified multi-specific antibody-like protein, an immunoconjugate, or a pharmaceutical composition as disclosed herein. In one embodiment, the method may further include co-administering an effective amount of a therapeutic agent. In one embodiment, the therapeutic agent may comprise an antibody, a chemotherapy agent, an enzyme, or a combination thereof.

[0065] In one embodiment, the subject is a human. In one embodiment, the subject is a mammal. In one embodiment, the subject is a chimpanzee. In one embodiment, the subject is a pet animal.

[0066] In a further aspect, the application provides a solution including an effective concentration of the multi-specific antibody-like protein, immunoconjugate, or pharmaceutical composition as disclosed herein. In one embodiment, the solution is blood plasma in a subject.

### BRIEF DESCRIPTION OF THE DRAWINGS

[0067] The foregoing and other features of this disclosure will become more fully apparent from the following description and appended claims, taken in conjunction with the accompanying drawings. Understanding that these drawings depict only several embodiments arranged in accordance with the disclosure and are, therefore, not to be considered limiting of its scope, the disclosure will be described with additional specificity and detail through use of the accompanying drawings, in which:

[0068] FIG. 1 depicts the heterodimeric configuration of miniGNC molecules with five binding domains (D1-D5), of which the two monomers are encoded by Chain A (N-D1-D3/VH-CH1-CH2-CH3-D4-C) and Chain B (N-D2-D3/VL-CL-CH2-CH3-D5-C);

[0069] FIG. 2 shows the dimerization of engineered miniGNC Chain A and Chain B with knockout mutations (KO) on either VH or Fc: (2A) by Protein-A purification to fractionate the mixture into the homodimer (a), the desired heterodimer (b), and the Chain B monomer (c); and (2B) by SDS-PAGE analysis of Protein-A fractionated homodimer (a), heterodimer (b), Chain B monomer (c), and Chain A monomer (d), at the expected sizes under non-reducing and reducing conditions;

[0070] FIG. 3 shows the comparative potency of multi-specific miniGNC molecules mediated TDCC on BXPC3 tumor cells by using penta-miniGNC (SI-75P6), tetra-miniGNC (SI-75E2), tri-miniGNC (SI-75X3), bi-miniGNC (SI-75X2), and mono-miniGNC (SI-7502) molecules;

[0071] FIG. 4 shows the comparative potency of miniGNC molecules mediated TDCC on BXPC3 tumor cell line with EC50 values in the range of 0.1 to 5.5 pM;

[0072] FIG. 5 shows the survival curves of TDCC assays measuring comparative potency of (A) multi-specific miniGNC molecules with stapled domains, including penta-miniGNC (SI-68P1), tetra-miniGNC (SI-68E2 and SI-68E1), and tri-miniGNC (SI-68x2), for killing pancreatic cancer cells (HPAFII) in TDCC assay, and (B) SI-68X1 against MCF-7 breast cancer cells; and

[0073] FIG. 6 shows the functionality of multi-specific miniGNC molecules possessing a dimeric NKG2D receptor, including tri-specific (SI-49R25), tetra-specific (SI-49P_X), penta-specific (SI-49PM1 and SI-49P8) in killing breast cancer cells (MDA-MB-231) in TDCC assay.

### DETAILED DESCRIPTION

[0074] In the following detailed description, reference is made to the accompanying drawings, which form a part hereof. In the drawings, similar symbols typically identify similar components, unless context dictates otherwise. The illustrative embodiments described in the detailed description, drawings, and claims are not meant to be limiting. Other embodiments may be utilized, and other changes may be made, without departing from the spirit or scope of the subject matter presented herein. It will be readily understood that the aspects of the present disclosure, as generally described herein, and illustrated in the Figures, can be arranged, substituted, combined, separated, and designed in a wide variety of different configurations, all of which are explicitly contemplated herein.

[0075] The disclosure provides, among others, isolated antibodies, methods of making such antibodies, bispecific or multi-specific molecules, antibody-drug conjugates and/or immuno-conjugates composed from such antibodies or antigen binding fragments, pharmaceutical compositions containing the antibodies, bispecific or multi-specific molecules, antibody-drug conjugates and/or immuno-conjugates, the methods for making the molecules and compositions, and the methods for treating cancer using the molecules and compositions disclosed herein.

[0076] The present application discloses multi-specific Guidance and Navigation Control (GNC) antibodies in miniature configurations (miniGNC). A miniGNC platform molecule is an assembled heterodimer of two polypeptide chains characterized by the formation of a Fab-Hinge-Fc region core structure with one, two, three, or four additional binding domains (from D1 to D5), as elucidated in FIG. 1. The two polypeptides may be configured, for Chain A (or Chain 1): N-D1-D3(VH)-CH1-Hinge-CH2-CH3-D4-C; and for Chain B (or chain 2): N-D2-D3(VL)-CL-Hinge-CH2-CH3-D5-C. The Fc domains of the two chains are engineered to contain complementary mutations, also known as “knobs-into-holes”, to enhance the formation of the heterodimer. A miniGNC platform molecule may have variable components. For example, the VH and VL of the Fab region may be replaced by a non-Fab dimer with or without binding specificity. An additional binding domain may be an antibody fragment, such as scFv or VHH, or a non-antibody structure, such as a ligand or a receptor. A miniGNC platform antibody may be bivalent, trivalent, tetravalent, or pentavalent with up to five distinct specificities, and retains the approximate size of a normal bivalent IgG antibody (tri-miniGNC Ab at 150 kD) or slightly larger (tetra-miniGNC Ab at 175 kD, and penta-miniGNC Ab at 200 kD).

[0077] The present application relates to methods of making and using miniGNC antibodies, in particular, penta-specific miniGNC antibodies (penta-miniGNC Ab). In general, GNC proteins, such as GNC antibodies, are characterized by comprising two moieties for engaging immune cells, such as activating T cells, while targeting tumor cells. Similar to GNC antibodies, miniGNC antibodies retain multiple antigen binding domains for engaging immune cells, such as anti-CD3 for T cell activation, anti-4-1BB for co-stimulation, and anti-PD-L1 for inhibiting immune checkpoint. To improve the efficacy of antibody therapy for treating cancer, miniGNC antibodies are designed to be structurally stable and compact while retaining the characteristic feature of two moieties in GNC antibodies. This improvement allows an additional binding specificity to a second tumor associated antigen on the same or different tumor cell. As compared to GNC antibodies, miniGNC contains an Fc domain that allows for FcRn-mediated recycling and half-life extension, as well as facile protein A-based purification. The Fc receptor-mediated immunity may be incorporated if desired. An Fc-containing miniGNC antibody is quite compact, which allows for better developability and increased tumor penetration. GNC antibodies are usually larger than an IgG antibody due to increased number of antigen binding domains (AgBD), which provides spatial flexibility for binding to both a T cell and a tumor cell. On the other hand, miniGNC antibodies retains the same approximate size as human IgG antibodies calculated at approximately 110-130 kD for bi-specific; 120-160 for tri-specific; 130-190 kD for tetra-specific; 140-220 kD for penta-specific; as compared to 150 kD for human IgG. The incorporation of one or two scFvs onto each chain may reduce chain-pairing complications and improve stability while navigating through tumor microenvironment. With these characteristic features, GNC and miniGNC antibodies may be alterative of an efficacious antibody therapy for treating the same cancer, since the moiety for targeting tumor associated antigens remains the same, including but not limited to, EGFR, HER2, HER3, EGRFVIII, CD19, BCMA, CD20, CD33, CD123, CD22, CD30, ROR1, CEA, LMP1, LMP2A, Mesothelin, PSMA, EpCAM, glypican-3, gpA33, GD2, TROP2, NKG2D ligand, CD39, CLDN18.2, DLL3, HLA-G, FcRH5, GPRC5D, LIV-1, MUC1, CD138, CD70, uPAR, CD38.

[0078] The term “antibody” is used in the broadest sense and specifically covers single monoclonal antibodies (including agonist and antagonist antibodies), antibody compositions with polyepitopic specificity, as well as antibody fragments (e.g., Fab, F(ab′)₂, and Fv), so long as they exhibit the desired biological activity. In some embodiments, the antibody may be monoclonal, polyclonal, chimeric, single chain, bispecific or bi-effective, human and humanized antibodies as well as active fragments thereof. Examples of active fragments of molecules that bind to known antigens include Fab, F(ab′)₂, scFv and Fv fragments, including the products of aFab immunoglobulin expression library and epitope-binding fragments of any of the antibodies and fragments mentioned above. In some embodiments, antibody may include immunoglobulin molecules and immunologically active portions of immunoglobulin molecules, i.e. molecules that contain a binding site that immunospecifically bind an antigen. The immunoglobulin can be of any type (IgG, IgM, IgD, IgE, IgA and IgY) or class (IgG1, IgG2, IgG3, IgG4, IgA1 and IgA2) or subclasses of immunoglobulin molecule. In one embodiment, the antibody may be whole antibodies and any antigen-binding fragment derived from the whole antibodies. A typical antibody refers to heterotetrameric protein comprising typically of two heavy (H) chains and two light (L) chains. Each heavy chain is comprised of a heavy chain variable domain (abbreviated as VH) and a heavy chain constant domain. Each light chain is comprised of a light chain variable domain (abbreviated as VL) and a light chain constant domain. The VH and VL regions can be further subdivided into domains of hypervariable complementarity determining regions (CDR), and more conserved regions called framework regions (FR). Each variable domain (either VH or VL) is typically composed of three CDRs and four FRs, arranged in the following order: FR1, CDR1, FR2, CDR2, FR3, CDR3, FR4 from amino-terminus to carboxy-terminus. Within the variable regions of the light and heavy chains there are binding regions that interacts with the antigen.

[0079] The term “monoclonal antibody” as used herein refers to an antibody obtained from a population of substantially homogeneous antibodies, i.e., the individual antibodies comprising the population are identical except for possible naturally occurring mutations that may be present in minor amounts. Monoclonal antibodies are highly specific, being directed against a single antigenic site. Furthermore, in contrast to conventional (polyclonal) antibody preparations which typically include different antibodies directed against different determinants (epitopes), each monoclonal antibody is directed against a single determinant on the antigen. In addition to their specificity, the monoclonal antibodies are advantageous in that they are synthesized by the hybridoma culture, uncontaminated by other immunoglobulins. The modifier “monoclonal” indicates the character of the antibody as being obtained from a substantially homogeneous population of antibodies and is not to be construed as requiring production of the antibody by any particular method. For example, the monoclonal antibodies to be used in accordance with the present disclosure may be made by the hybridoma method first described by Kohler & Milstein, Nature, 256:495 (1975), or may be made by recombinant DNA methods (see, e.g., U.S. Pat. No. 4,816,567).

[0080] The monoclonal antibodies may include “chimeric” antibodies (immunoglobulins) in which a portion of the heavy and/or light chain is identical with or homologous to corresponding sequences in antibodies derived from a particular species or belonging to a particular antibody class or subclass, while the remainder of the chain(s) is identical with or homologous to corresponding sequences in antibodies derived from another species or belonging to another antibody class or subclass, as well as fragments of such antibodies, so long as they exhibit the desired biological activity (U.S. Pat. No. 4,816,567; and Morrison et al., Proc. Natl. Acad. Sci. USA, 81:6851-6855 [1984]).

[0081] Monoclonal antibodies can be produced using various methods including mouse hybridoma or phage display (see Siegel. Transfus. Clin. Biol. 9:15-22 (2002) for a review) or from molecular cloning of antibodies directly from primary B cells (see Tiller. New Biotechnol. 28:453-7 (2011)). In the present disclosure antibodies were created by methods of immunizing rabbits, mice, or llama in combination with subsequent strategies like hybridoma or display. Rabbits are known to create antibodies of high affinity, diversity and specificity (Weber et al. Exp. Mol. Med. 49:e305). Besides immunization of rabbits followed by B cell culture, other common strategies for antibody generation and discovery include immunization of other animals (e.g., mice, llamas) followed by hybridoma and/or display on phage, yeast, or mammalian cells; or display using synthetic variable gene libraries. This general method of antibody discovery is similar to that described in Seeber et al. PLOS One. 9:e86184 (2014).

[0082] The term “antigen- or epitope-binding portion or fragment” refers to fragments of an antibody that are capable of binding to an antigen. These fragments may be capable of the antigen-binding function and additional functions of the intact antibody. Examples of binding fragments include, but are not limited to a single-chain Fv fragment (scFv) consisting of the VL and VH domains of a single arm of an antibody connected in a single polypeptide chain by a synthetic linker or a Fab fragment which is a monovalent fragment consisting of the VL, constant light (CL), VH and constant heavy 1 (CH1) domains. Antibody fragments can be even smaller sub-fragments and can consist of domains as small as a single CDR domain, in particular the CDR3 regions from either the VL and/or VH domains (for example see Beiboer et al., J. Mol. Biol. 296:833-49 (2000)). Antibody fragments are produced using conventional methods known to those skilled in the art. The antibody fragments can be screened for utility using the same techniques employed with intact antibodies.

[0083] The “antigen- or epitope-binding fragments” can be derived from an antibody of the present disclosure by a number of art-known techniques. For example, purified monoclonal antibodies can be cleaved with an enzyme, such as pepsin, and subjected to HPLC gel filtration. The appropriate fraction containing Fab fragments can then be collected and concentrated by membrane filtration and the like. For further description of general techniques for the isolation of active fragments of antibodies, see for example, Khaw, B. A. et al. J. Nucl. Med. 23:1011-1019 (1982); Rousseaux et al. Methods Enzymology, 121:663-69, Academic Press, 1986.

[0084] Papain digestion of antibodies produces two identical antigen binding fragments, called “Fab” fragments, each with a single antigen binding site, and a residual “Fc” fragment, whose name reflects its ability to crystallize readily. Pepsin treatment yields an F(ab′)₂ fragment that has two antigen combining sites and is still capable of cross-linking antigen.

[0085] The Fab fragment may contain the constant domain of the light chain and the first constant domain (CH1) of the heavy chain. Fab′ fragments differ from Fab fragments by the addition of a few residues at the carboxy terminus of the heavy chain CH1 domain including one or more cysteines from the antibody hinge region. Fab′-SH is the designation herein for Fab′ in which the cysteine residue(s) of the constant domains bear a free thiol group. F(ab′)₂ antibody fragments originally were produced as pairs of Fab′ fragments which have hinge cysteines between them. Other, chemical couplings of antibody fragments are also known.

[0086] “Fv” is the minimum antibody fragment which contains a complete antigen recognition and binding site. This region consists of a dimer of one heavy and one light chain variable domain in tight, non-covalent association. It is in this configuration that the three CDRs of each variable domain interact to define an antigen binding site on the surface of the VH-VL dimer. Collectively, the six CDRs confer antigen binding specificity to the antibody. However, even a single variable domain (or half of an Fv comprising only three CDRs specific for an antigen) has the ability to recognize and bind antigen, although at a lower affinity than the entire binding site.

[0087] The “light chains” of antibodies (immunoglobulins) from any vertebrate species can be assigned to one of two clearly distinct types, called kappa (κ) and lambda (λ), based on the amino acid sequences of their constant domains.

[0088] Depending on the amino acid sequence of the constant domain of their heavy chains, immunoglobulins can be assigned to different classes. There are five major classes of immunoglobulins: IgA, IgD, IgE, IgG and IgM, and several of these may be further divided into subclasses (isotypes), e.g., IgG-1, IgG-2, IgG-3, and IgG-4; IgA-1 and IgA-2. The heavy chain constant domains that correspond to the different classes of immunoglobulins are called α, delta, epsilon, γ, and μ, respectively. The subunit structures and three-dimensional configurations of different classes of immunoglobulins are well known.

[0089] A “humanized antibody” refers to a type of engineered antibody having its CDRs derived from a non-human donor immunoglobulin, the remaining immunoglobulin-derived parts of the molecule being derived from one (or more) human immunoglobulin(s). In addition, framework support residues may be altered to preserve binding affinity. Methods to obtain “humanized antibodies” are well known to those skilled in the art. (see, e.g., Queen et al., Proc. Natl Acad Sci USA, 86:10029-10032 (1989), Hodgson et al., Bio/Technology, 9:421 (1991)).

[0090] The terms “polypeptide”, “peptide”, and “protein”, as used herein, are interchangeable and are defined to mean a biomolecule composed of amino acids linked by a peptide bond.

[0091] The terms “a”, “an” and “the” as used herein are defined to mean “one or more” and include the plural unless the context is inappropriate.

[0092] By “isolated” is meant a biological molecule free from at least some of the components with which it naturally occurs. “Isolated,” when used to describe the various polypeptides disclosed herein, means a polypeptide that has been identified and separated and/or recovered from a cell or cell culture from which it was expressed. Ordinarily, an isolated polypeptide will be prepared by at least one purification step. An “isolated antibody,” refers to an antibody which is substantially free of other antibodies having different antigenic a binding specificity.

[0093] “Recombinant” means the antibodies are generated using recombinant nucleic acid techniques in exogeneous host cells.

[0094] The term “antigen” refers to an entity or fragment thereof which can induce an immune response in an organism, particularly an animal, more particularly a mammal including a human. The term includes immunogens and regions thereof responsible for antigenicity or antigenic determinants.

[0095] Also, as used herein, the term “immunogenic” refers to substances which elicit or enhance the production of antibodies, T-cells or other reactive immune cells directed against an immunogenic agent and contribute to an immune response in humans or animals. An immune response occurs when an individual produces sufficient antibodies, T-cells and other reactive immune cells against administered immunogenic compositions of the present disclosure to moderate or alleviate the disorder to be treated.

[0096] “Specific binding” or “specifically binds to” or is “specific for” a particular antigen or an epitope means binding that is measurably different from a non-specific interaction. Specific binding can be measured, for example, by determining binding of a molecule compared to binding of a control molecule, which generally is a molecule of similar structure that does not have binding activity. For example, specific binding can be determined by competition with a control molecule that is similar to the target.

[0097] The term “affinity” refers to a measure of the attraction between two polypeptides, such as antibody/antigen, receptor/ligand, etc. The intrinsic attraction between two polypeptides can be expressed as the binding affinity equilibrium dissociation constant (KD) of a particular interaction. A KD binding affinity constant can be measured, e.g., by Bio-Layer Interferometry, where KD is the ratio of kdis (the dissociation rate constant) to kon (the association rate constant), as KD=kdis/kon.

[0098] Specific binding for a particular antigen or an epitope can be exhibited, for example, by an antibody having a KD for an antigen or epitope of at least about 10⁻⁴ M, at least about 10⁻⁵ M, at least about 10⁻⁶ M, at least about 10⁻⁷ M, at least about 10⁻⁸ M, at least about 10⁻⁹ M, alternatively at least about 10⁻¹⁰ M, at least about 10⁻¹¹ M, at least about 10⁻¹² M, or greater, where KD refers to the equilibrium dissociation constant of a particular antibody-antigen interaction. Typically, an antibody that specifically binds an antigen will have a KD that is 20-, 50-, 100-, 500-, 1000-, 5,000-, 10,000- or more times greater for a control molecule relative to the antigen or epitope.

[0099] Also, specific binding for a particular antigen or an epitope can be exhibited, for example, by an antibody having a KA or Ka for an antigen or epitope of at least 20-, 50-, 100-, 500-, 1000-, 5,000-, 10,000- or more times greater for the epitope relative to a control, where KA or Ka refers to an association rate of a particular antibody-antigen interaction.

[0100] “Homology” between two sequences is determined by sequence identity. If two sequences which are to be compared with each other differ in length, sequence identity preferably relates to the percentage of the nucleotide residues of the shorter sequence which are identical with the nucleotide residues of the longer sequence. Sequence identity can be determined conventionally with the use of computer programs. The deviations appearing in the comparison between a given sequence and the above-described sequences of the disclosure may be caused for instance by addition, deletion, substitution, insertion or recombination.

[0101] The present disclosure may be understood more readily by reference to the following detailed description of specific embodiments and examples included herein. Although the present disclosure has been described with reference to specific details of certain embodiments thereof, it is not intended that such details should be regarded as limitations upon the scope of the disclosure.

### EXAMPLES

### Example 1: Configuration of Penta-Specific miniGNC Antibodies

[0102] The design of miniGNC antibodies relies on the co-expression and assembling of two polypeptide chains of a heterodimer between Chain A and Chain B (FIG. 1). While Chain A may be a native heavy chain (HC), Chain B is a recombinant fusion peptide between the light chain and the Fc domain of HC. At the core of this antibody structure, there is a Fab region (VH-CH1/VL-CL) followed by the hinge and Fc region (CH2-CH3/CH2-CH3) of human IgG1. “Knobs-into-holes” mutations or other complementary sets of mutations may be introduced into the CH3 domains to destabilize homodimers and favor heterodimer formation (Ridgway J B, Presta L G, Carter P., Protein Eng 1996; 9:617-21). The “hole” mutations in the CH3 domain of Chain A consist of T366S, L368A, and Y470V, while the “knob” mutation in the CH3 domain of Chain B is T366W. The “knob” created by the T366W mutation on Chain B preferentially interacts with the “hole” created by the three mutations on Chain A. This preferential pairing may further stabilize the heterodimer while the non-covalent pairing of the Fab domain components (i.e. between VH-CH1 on Chain A and VL-Ck on Chain B) creates a functional Fab region. In other words, a functional D3 binding domain, such as a functional Fab region or a non-Fab receptor dimer, can only be created in Chain A-Chain B heterodimers. As compared to GNC antibodies, miniGNC antibodies also contain antibody fragments from native IgG (Fab, Fc) and other variable-sequence based structures, such as scFv and VHH, but are engineered to preferentially configure a Fab region-Hinge-Fc region structure after the formation of a heterodimer. The characteristic feature of miniGNC antibodies is the compactness of this engineered structure.

[0103] One or more structurally diversified antigen binding domain may be added to the two N-terminals and the two C-terminals of a miniGNC molecule as D1, D2 D4, or D5, thereby creating up to five binding specificities. Each of these added binding domains may be variable-sequence-based structures, such as scFv and VHH, or non-variable sequence-based structures, such as ligand and receptor. As elucidated in FIGS. 1, D1 and D2 refer to the binding domains linked to the N-terminals of Chain A and Chain B, respectively, whereas D4 and D5 refer to the binding domains linked to the C-terminals of Chain A and Chain B, respectively. Thus, the two polypeptides of a penta-specific miniGNC (penta-miniGNC) antibody may be configured as

[0104] Chain A: N-D1-D3(VH)-CH1-Hinge-CH2-CH3-D4-C; and

[0105] Chain B: N-D2-D3(VL)-CL-Hinge-CH2-CH3-D5-C;

where VL may be either Vλ or Vκ and CL may be either Cλ or Cκ as shown in FIG. 1.

[0106] Depending on the number of binding domains and their binding specificities, the structural configuration of the penta-miniGNC antibody in FIG. 1 may be simplified by reducing one or more binding domains and becoming tetra-, tri-, and bi-miniGNC. For incidence, Table 1 depicts the generation and characterization of a family of anti-CD3 miniGNC antibodies for optimizing their efficacy of targeting EGFR and HER3. In this case, each binding domain exerts one binding specificity. When two of its five binding domains target the same epitope of an antigen, i.e. the same binding specificity, the penta-miniGNC antibody becomes a tetra-specific penta-miniGNC antibody.

### Example 2: Engineered Core Structure of miniGNC Antibodies

[0107] To demonstrate that the configuration of miniGNC may be translated into stable and functional heterodimeric protein, a simplified asymmetric format was designed for evaluating the effect of configuration and mutations to the heterodimer formation of miniGNC molecules. Briefly, a single scFv (D1) is fused to the N-terminus of Chain A, whereas the Chain B does not have any added binding domain. In this way, the proportion of each species of dimerization between Chain A and Chain B may be distinguished by SDS-PAGE and SEC, as the predicted sizes for a Chain A homodimer (not observed), a Chain B homodimer, and a Chain A and Chain B heterodimer are 100 kDa, 150 kDa, and 125 kDa, respectively) (FIG. 2).

[0108] To engineer a strategy for selectively purifying the heterodimeric miniGNC molecule from a mixture, two amino acid residues in the CH3 domain (H435 and Y436) of the Chain B are substituted. In particular, the histidine (H435) is critical for the Chain B to bind to protein-A resins during the purification of therapeutic antibodies (Tustian et al., 2016), and the substitution of this amino acid or a ProA knockout mutation (ProAKO) terminates the protein-A binding. This strategy may allow separation of the heterodimer via selective elution from a protein-A column. As the protein-A column retains the heterodimer through its parental heavy chain binding site, the Chain B homodimer flows through as the Chain B lacks protein-A binding. The design of a ProAKO on the Chain B minimizes any possible issue of altering immunogenicity by amino acid substitutions of the protein-A binding site with residues taken from the homologous region in the IgG3 subclass. Although most of miniGNC molecules will predominantly incorporate the structure and sequence of IgG1 subtype, IgG3 has an overall similar structure to other IgG subclasses with some specific structural perturbations in binding to protein-A, protein-G and FcRn (neonatal Fc receptor). This difference is based on Fc sequence difference as revealed earlier where the presence of R435 (H435 in other subtypes) in IgG3 ablates its Fc interaction with protein-A. Hence, in representative miniGNC molecules, amino acids critical for protein-A binding on miniGNC Chain B (H435 and F436) have been mutated to the IgG3 counterpart sequences (R435 and Y436).

[0109] In the class of multi-specific miniGNC antibodies with an addition of scFv fused to the N terminal of Chain B, the interaction to protein-A binding is still possible if the scFv comes from VH3 family. VH3 encoded antibodies are known to interact with Staphylococcal Protein A (SPA) and residues in FR1, CDR2 and FR3 have been identified to be involved in SPA binding (Roben, et al., 1995), and structural data indicated that the replacement of a single involved region with the corresponding region from the nonbinding immunoglobulin ablates protein-A binding by VH3 encoded antibodies. Substitution of the amino acid R19 in FR1 was identified to be critical in binding to protein-A and was undertaken with the amino acid sequence (S19) from equivalent region in the VH4 family.

[0110] Four sets of miniGNC molecules (SEQ ID 1-16) with four different versions of chain B mutations (SEQ ID 3, 7, 11 and 15) embracing different combinations of ProAKO: H435R/Y436F (Fc) and R19S (VH) were purified and analyzed with analytical size exclusion chromatography. Only protein containing Chain B with both sets of mutations allowed complete removal of Chain B contaminants (FIG. 2A). This VH3 protein A knockout mutation (R19S) together with Fc ProteinA knockout mutations (H435R, F436Y) on Chain B was incorporated in most of the multi-specific antibody formats and used to produce bi-, tri-, tetra- and penta-miniGNC molecules.

[0111] To demonstrate the feasibility of generating functional miniGNC proteins with alternative antibody isotypes, an example miniGNC containing IgG4 constant regions was generated. SI-75XM9 (SEQ ID 297-300) is analogous to SI-75X5 (SEQ ID 1-4) bispecific miniGNC, except that the IgG1 CH1, hinge, and Fc were replaced with IgG4 CH1, hinge, and Fc. Notably, both proteins have the same binding domains (anti-HER3 domain in D2 and anti-CD3* domain in D3) and contain the same core structure and mutations (Knobs-into-Holes Fc mutation; R19S in anti-HER3 scFv; and H435R/Y436F mutations in Fc). As shown in Table 8, SI-75XM9 had comparable titer to SI-77X5, and had a significant 19% increase in the percent protein of interest (85.6% POI vs. 72.2% POI) after protein A purification, as assessed by analytical SEC. The reduction in high molecular weight species could be related to the shorter hinge length of IgG4 (12 amino acids instead of 15), which could reduce the propensity for association of higher-order oligomers. Thus, generation of miniGNC proteins with alternative antibody isotypes is not only possible, but can lead to more favorable properties such as decreased aggregation.

### Example 3: Configuration of Multi-Specific miniGNC Antibodies

[0112] To generate and characterize the first group of multi-specific miniGNC antibodies, a trio of moiety 1 binding domains, i.e. αCD3, αPD-L1, and α4-1BB, and two moiety 2 binding domains against EGFR and HER3, respectively, were selected for comparison. As shown in Table 1, the group was subdivided into penta-miniGNC, tetra-miniGNC, tri-miniGNC, and bi-miniGNC groups. Of each subgroup, there was at least one miniGNC antibody having the CD3 binding from D3. The penta-miniGNC group includes SI-75P6 (SEQ ID 17, 19, with αEGFR from D3 position), SI-75P4 (SEQ ID 21, 23, with 41BBL, the ligand to 4-1BB receptor, at D4), SI-75P3 (SEQ ID 25, 27), and SI-75P9 (SEQ ID 29, 31, with αHER3 from D3). The tetra-miniGNC group have two antibodies, SI-75E1 (SEQ ID 33, 35) and SI-75E2 (SEQ ID 37, 39) comparing the effect in the presence and absence of either α4-1BB or αPD-L1 domain. The tri-miniGNC group have three antibodies, SI-75X3 (SEQ ID 41, 43), SI-75X16 (SEQ ID 45, 47), and SI-75X18 (SEQ ID 49, 51) for comparing the two moiety 2 binding domains on either N- or C-terminus of the heterodimer. The bi-miniGNC group have three antibodies, SI-75X1 (SEQ ID 53, 55), SI-75X2 (SEQ ID 57, 59), and SI-75X5 (SEQ ID 1, 3), each of which has one moiety 1 binding domain and one moiety 2 binding domain.

[0113] The DNA encoding each member of the first group of miniGNC antibodies were cloned into vector pTT5, which were expressed with acceptable titers using ExpiCHO expression systems for 9 days. The miniGNC antibodies were purified with 5 mL MabSelect protein-A columns followed by Size Exclusion using a highload 16/600 200 pg preparative SEC column on either an Akta Avant or Purifier system. SEC aggregates were analyzed using a waters HPLC linked to multi angle light scattering (MALS, Wyatt systems) to identify correct molecular weight by do/dc calculated methods.

### Example 4: Octet Analysis of Binding Affinity

[0114] To assess the functionality of miniGNC antibodies, the binding affinity of each domain was determined by using Biolayer Interferometry (Octet 384 system). Octet analysis was used to ensure that the selected miniGNC antibody retains the binding specificity and affinity to all their cognate antigens. Each miniGNC antibody was loaded onto AHC sensors for 180 seconds at 10 ug/ml, followed by a 60-second baseline step, a 180-second association step with 100 nM of commercially purchased human antigen, and a 360-second dissociation step. Samples for all steps were in Octet buffer (PBS containing 0.1% Tween 20 and 1% BSA). Fits were performed using a 1:1 binding model to extract affinity KD values. As shown in Table 1, the binding affinity for each binding domain, as measured by its KD, varies within an acceptable range. For moiety 1 binding, the KD for αCD3 domain may vary between 17.4 and 36.2 nM, for αPD-L1 between 1 and 2.72 nM, and for α4-1BB between 7.51 and 37.3 nM; and for moiety 2 binding, the KD for αEGFR varies between 5.56 and 11.1, and for αHER3 between 112.8 and 185 nM.

### Example 5: Comparative Potency of Multi-Specific miniGNC Antibodies

[0115] The first group of multi-specific miniGNC antibodies was subjected to T-cell dependent cellular cytotoxicity (TDCC) assay for measuring the potency for killing cancer cells. With an αCD3 binding domain in all molecules, this group of miniGNC antibodies was equipped to engage T cells, redirect T-cell mediated cytolysis, and ultimately kill target cells.

[0116] A luminescence-based T-cell dependent cellular cytotoxicity (TDCC) assay was used to measure the extent of antibody-induced cellular cytotoxicity by quantification of cell viability via constitutive expression of luciferase. Luciferised BXPC3 human pancreatic cancer cell lines (ATCC, Manassas, Va.) were cultured at 37° C., 5% CO2 in RPMI (ATCC, Manassas, Va.) medium with 10% heat-inactivated fetal bovine serum (Invitrogen, Waltham, Mass.). Cell viability was monitored with a Vi-CELL automated cell counter (Beckman Coulter, Pasadena, Calif.). Target cell surface expression was measured by flow cytometry. Human pancreatic cancer cells, BXPC3 cells, were co-cultured with human pan T-cells at an effector-to-target (E:T) ratio of 5:1 and antibodies were added with a 5-fold dilution series (0-30 nM). Using a Multidrop bulk liquid dispenser (BIOTEK, Winooski, Vt.), 500 cells per well of target cells (20 μL per well) and 25,00 cells per well of T-cells (20 μL/well) were plated sequentially into 384-well, white, flat-bottom, polystyrene TC-treated microplates (Corning, Corning, N.Y.). Antibody dilutions were added (10 μL/well) and plates were incubated for 72 hrs at 37° C., 5% CO2 before luminescence-based cell viability quantification. 20 ul of Bright-Glo (Promega) was added to wells, and luminescence corresponding to viability of tumor cells was determined using a CLARIOstar plate reader.

[0117] Data were fit to a sigmoidal function to calculate and list EC50 values in Table 1 for comparison. FIG. 3 shows the dose-dependent cell viability curves of miniGNC antibodies selected from a penta-miniGNC (SI-75P6), a tetra-miniGNC (SI-75E2), a tri-miniGNC (SI-75X3), a bi-miniGNC (SI-75X2), and a mono-miniGNC (SI-7502) molecule. While all multi-specific miniGNC antibodies were capable of killing BXPC3 cells completely, both pent- and tetra-miniGNC antibodies steadily displayed high potency in the range of EC50 in pM. In this regard, SI-75X1 was exceptionally potent. The data demonstrate the important roles of moiety 1 binding domains, in particular, the αPD-L1 domain as an immune checkpoint inhibitor when targeting BXPC3 cancer cells.

### Example 6: Configuration of CD3 Binding Domain in miniGNC Antibodies

[0118] By definition, a miniGNC antibody is capable of interfacing with at least one immune effector cell and one target cancer cell through the binding of its moiety 1 and 2 binding domains, respectively. Using the general scheme of miniGNC antibody configuration (FIG. 1), it is possible that assigning two moiety 2 binding domains to D1 and D2 may lead to different efficacy from assigning them to D1 and D4 or D2 and D5 because the relative position of the targets on the cell surface is different, either on the top and bottom or on both sides. In this context, a second group of penta-miniGNC antibodies were configured and listed in Table 2. This group of minGNC antibodies share the same binding specificities to CD3, CD19, EGFR, 4-1BB, and PD-L1, and the same binding domains at D2, D4, and D5. SI-68P13 (SEQ ID 69, 71) has αCD3 D3 domain, which is comparable to SI-75P3 of the first group except the difference in D2, i.e. αCD19 vs. αHER3, and to SI-68P17 (SEQ ID 73, 75) of the second group except the switch of αCD3 domain to D1. The rest of the second group of miniGNC antibodies share the same binding specificities from D1 (αCD3) and D3 (αEGFR). SI-68P17 (with the binding specificity to CD19, 4-1BB and PD-L1, respectively.

[0119] Anti-CD3 antibody plays a central role in T cell activation based immune therapy. Humanized antibody is desirable for the development of a therapeutic antibody. CD3 domain was incorporated into positions D1 and D3 to generate SI-68P17 (SEQ ID 73, 75) and SI-68P13 (SEQ ID 69, 71) for testing positional effect. The anti-CD3 sequences in humanized framework 1 (CD3**), 2 (CD3***) 3 (CD****) and 4 (CD*****) were cloned into an expression cassette for producing SI-68P15 (SEQ ID NO. 77, 79), SI-68P18 (SEQ ID 81, 83), SI-68P19 (SEQ ID 85, 87), and SI-68P16 (SEQ ID 89, 91) (Table 2). Each expression cassette was transfected into 25 mL of ExpiCHO and expressed for 8 days followed by protein-A affinity chromatography for harvesting and purifying each penta-miniGNC antibody. The antibodies were produced with good titer (Table 2). Octet was used to verify that the penta-miniGNC antibodies containing different CD3 domains, can bind to human CD3, respectively (Table 2). Each penta-miniGNC antibody was loaded via AHC sensors at 10 μg/ml and bound to a serial dilution (highest 200 nM, 1:2.5 dilutions) or a single 100-nM concentration of His-tagged human CD3. The resulting global fit to a 1:1 binding model demonstrated that the penta-GNC antibodies bind to CD3 with affinities in the low nanomolar range (Table 2).

[0120] To evaluate the effect of CD3-mediated T cell directed cytotoxicity on cancer cells, BXPC3 tumor cell line was used as target. Serial dilutions (0 to 30 nM; 1 to 5 dilution factor) of antibodies were added to a white 384-well plate containing luciferized target cells and activated T cells (plated immediately before drug; effector:target=5:1) in a total volume of 50 ul. After an additional 72 hours, 20 ul of Bright-Glo (Promega) was added to wells, and luminescence corresponding to viability of luciferized tumor cells was determined using a CLARIOstar plate reader. Data were fit to a sigmoidal function to calculate EC50 values, which were in the range of 0.1 to 5.5 pM as shown by FIG. 4 and listed in Table 2. The data demonstrate that there are certain degrees of flexibility in anti-CD3 positioning, configuration, and binding affinity.

### Example 7. Multi-Specific miniGNC Antibodies Having VHH as Binding Domains

[0121] To multi-specific antibody platforms, such as GNC and miniGNC antibodies that contain multiple scFv domains, a potential issue is related to chain mispairing due to multiple VH and VL domains in the same molecule. Different VH and VL domains have different propensities to interact with each other. If binding domains of different specificity have superior interaction energy, then the wrong pairings may form when the protein assembles. As a result, none of the binding domains will bind their targeted antigens.

[0122] VHH refers to “antibodies” with single Ig domains, i.e. “heavy chain only”, also known as a single-domain antibody (sdAb) or a nanobody. The first single-domain antibodies were engineered from heavy-chain antibodies found in camelids, also known as V_{H}H fragment (VHH).

[0123] VHH domains have been increasingly incorporated into antibody-based therapeutics due to several favorable properties. VHH domains may have increased stability and solubility compared to more traditionally used scFv domains. Whereas the VH/VL interface of traditional antibody variable regions is hydrophobic, the transient exposure of these surfaces can result in significant aggregation or precipitation. On the other hand, VHH domains have a naturally more hydrophilic surface and therefore can have superior solubility and stability properties. An obvious benefit of VHH domains over Fab or scFv domains is their small size. Where Fab domains are about 50 kDa and scFv domains are about 25 kDa, VHH domains are a very compact 12-15 kDa. The penta-miniGNC antibodies contain five binding domains (FIG. 1). Incorporation of VHH domains instead of scFv domains may significantly decrease molecular size, and increase tumor penetration.

[0124] A third group of multi-specific miniGNC antibodies were created and configured to have VHH binding domains against EGFR and HER3 (Gottlin et al., 2009; Eliseev et al., 2018) (Table 3). Penta, Tri, and bi specific single domain variable regions (VHH)-incorporated miniGNC molecules were constructed and purified with reasonable titer. Binding activity of each domain of multi-specific miniGNCs: SI-75P5 (SEQ ID 93, 95), SI-75P8 (SEQ ID 97, 99), SI-75X4 (SEQ ID 101,103), SI-75X17 (SEQ ID 105, 107), SI-75X19 (SEQ ID 109, 111), SI-75X9 (SEQ ID 113-115), SI-75X11 (SEQ ID 117,119), SI-75X15 (SEQ ID 121,123) and SI-75X13 (SEQ ID 125, 127) were verified using Octet. AHC sensors were used to capture the GNC antibody at a concentration of 10 ug/ml for 180 seconds. After a 60-second baseline step, a single concentration of antigen was used for a 180-second association step. Antigens tested include 200 nM human EGFR (purified in-house), 100 nM human CD3 (Acro CDD-H52W1), 20 nM human PD-L1 (Acro PD1-H5229), 400 nM human 4-1BB (purified in-house), 200 nM human HER3 (Acro ER3-H5223). After association, a 420-second dissociation step was used. The tabulated K_{D} values were calculated using a one-to-one binding model in ForteBio Data Analysis software version 11. The data demonstrated that all domains retained high affinity in the VHH-incorporated miniGNC platform.

[0125] T cell directed cytotoxicity on cancer cells, BXPC3 tumor Cell line was used as target. Serial dilutions (0 to 30 nM; 1 to 5 dilution factor) of antibodies were added to a white 384-well plate containing luciferized target cells and activated T cells (plated immediately before drug; effector:target=5:1) in a total volume of 50 ul. After an additional 72 hours, 20 ul of Bright-Glo (Promega) was added to wells, and luminescence corresponding to viability of luciferized tumor cells was determined using a CLARIOstar plate reader. EC50 values are tabulated in Table 3.

### Example 8. Engineered Fab (D3) Domain for Improved Expression and Protein Quality

[0126] A disulphide staple was optionally introduced in the VH-VL interface of the fab region (FIG. 5). The purpose of this engineering was improving heterodimer pairing and stabilize the overall structure by the formation of a covalent disulphide bond (Weatherill et al., 2012) at the core-fab interface. Cysteines pair was optionally introduced to form disulphide bond at V_{L}A100 on Chain B and its corresponding V_{H}A44 on Chain A fab region.

[0127] A pair of penta-miniGNC antibodies (SI-38P11 and SI-76PM1) (SEQ ID NO. 129 and 131; 133 and 135) with identical binding specificities were created for analysing the effect of stapled variable region in the Fab. The Chain A of the two antibodies comprises αCD20 scFv at D1, αCD3 VH at D3 (VH Fab-CH1-Fc), and α4-1BB at D4, whereas Chain B comprises αCD19 at D2, αCD3V_{L} at D3 (VKappa Fab CL-Fc) and αPD-L1 scFv at D5 (Table 4) according to the naming system in FIG. 1. SI-76PM1 was constructed with an additional disulphide in the D3 (VH/VL Fab-CH1/CL-Fc) and SI-38P11 was constructed without any additional disulphide pairing in the VH/VL fab.

[0128] Penta-miniGNC antibody constructs with and without the disulphide staple at position D3 were expressed in ExpiCHO system. Construct with stapled D3 (SI-76PM1) was produced with significantly higher titer than SI-38P11. Both proteins were purified with 5 mL MabSelect protein A columns followed by Size Exclusion using a hiload 16/600 200 pg preparative SEC column on either an Akta Avant or Akta Pure Purifier system. SEC aggregates were analyzed using a waters HPLC linked to multi angle light scattering (MALS, Wyatt systems) to identify correct molecular weight by do/dc calculated methods. With all of the analyses conducted as shown in Table 4, the disulfide bonded, i.e. “D3 stapled Fab”, penta-miniGNC antibodies displayed 5% higher protein of interest production. Both molecules exhibited comparable antigen binding kinetics (Table 4).

### Example 9. Multi-Specific miniGNC Antibodies with Stapled scFv Binding Domains

[0129] The core structure of multi-specific miniGNC molecules were engineered to acquire several features in order to stabilize the heterodimer, including the covalently linked hinge and non-covalent and preferential interaction of “knobs-into-holes” by the CH3 domains in Fc region. While the stability and compactness are desirable, it remains unclear whether the closer proximity of D1 and D2 or D3 and D4 may affect their stability and independent function. To maintain the stability and independence of each added binding domains, one option is to introduce a disulfide bond at V_{L}100 and V_{H}44 in each scFv domain, i.e. to staple each scFv domain. A disulfide bond between V_{L} and V_{H} may be used for all scFv domains to stabilize the overall structure. Alternatively, a disulphide bond may be introduced into at least one selected scFv domain at any position.

[0130] Four miniGNC antibodies have their D1 and D2 targeting EGFR and HER3 were grouped for measuring comparative potency of TDCC to the pancreatic cancer cells (HPAF-II), including tri-miniGNC (SI-68X2, SEQ ID NO. 137,139), tetra-miniGNC (SI-68E1, SEQ ID NO, 141, 143, and SI-68E2, SEQ ID NO. 145, 147), and penta-miniGNC (SI-68P1, SEQ ID NO. 149, 151) molecules. The moiety 1 binding specificities to 4-1BB and PD-L1 were the variable, whereas CD3 was the constant as D3 in the group interms of multispecificity. The expression construct encoding each of these four miniGNC antibodies was modified such that all scFv domains carrying a disulfide bond. The constructs were expressed individually in ExpiCHO system and each antibody was purified with reasonable titer. The binding kinetics to respective antigens were verified using Octet. AHC sensors were used to capture the miniGNC antibody at a concentration of 10 ug/ml for 180 seconds. After a 60-second baseline step, a single concentration of antigen was used for a 180-second association step. Antigens tested included 200 nM human EGFR (purified in-house), 100 nM human CD3 (Acro CDD-H52W1), 20 nM human PD-L1 (Acro PD1-H5229), 400 nM human 4-1BB (purified in-house), 200 nM human HER3 (Acro ER3-H5223). After association, a 420-second dissociation step was used. The tabulated K_{D} values were calculated using a one-to-one binding model in ForteBio Data Analysis software version 11. Analysed KD values for each miniGNC molecule with all stapled scFv domains, as shown in Table 5, were compared with KDs of monoclonal antibody controls for respective antigens as shown in Table 6. The binding kinetics data shows comparable binding affinity of each stapled scFv domain with its respective mAb or Fc-scFv control SI-1C3 (SEQ ID 181, 183) SI-1C7 (SEQ ID 185), SI-9C21 (SEQ ID 187, 189), SI-35SF11 (SEQ ID 191), SI-3SF11 (SEQ ID 193), SI-20C14 (SEQ ID 287 and 289) (Table 6), suggesting that stapling one or more scFv domains seems to have little effect to the binding affinity.

[0131] To evaluate the effect of stapled scFv domains to the potency of the miniGNC antibody, T cell directed cytotoxicity (TDCC) assay was used and the target cells were HPAF-II, human a human pancreatic cancer cell line (ATCC, Manassas, Va.). The surface expression of the target cells was validated by flow cytometry. Serial dilutions (0 to 30 nM; 1 to 5 dilution factor) of antibodies were added to a white 384-well plate containing target cells and activated T cells (plated immediately before drug; effector:target=5:1) in a total volume of 50 ul. After an additional 72 hours, 20 ul of Bright-Glo (Promega) was added to wells, and luminescence corresponding to viability of luciferised tumor cells was determined using a CLARIOstar plate reader. Data were fit to a sigmoidal function to calculate EC50 values. As shown in FIG. 6 and Table 5, the survival curves revealed that the potency of all four miniGNC antibodies was be within the dose range of pM and with a tendency of the penta-miniGNC antibody exerting higher TDCC potency than that of tetra-miniGNC and tri-miniGNC antibodies. This observation again shows little effect by using stapled scFv domains.

### Example 10. miniGNC Having NKG2D Receptor Dimer as a Binding Domain

[0132] An increased number of binding specificities allows the GNC antibodies to bind not only T cells but also subsets of T cells, natural killer cells, and other types of immune cells, collectively known as moiety 1 binding domains/specificities (see Applicant's applications, WO/2019/005641 and WO2019191120, incorporated herein in its entirety). Some of moiety 1 binding specificities may replace the cellular response to or recognition of targeted cells. For example, NKG2D is a major recognition receptor for the detection and elimination of transformed and infected cells, as its ligands are induced during cellular stress, either as a result of viral infection or genomic stress, such as in cancer. In humans, NKG2D is expressed by NK cells, cells, and CD8+ T cells. The addition of NKG2D as a binding domain/specificity to the class of miniGNC antibodies may improve the cytotoxicity and efficacy of the antibody as a single multi-functional therapeutic agent.

[0133] In NK cells, NKG2D serves as an activating receptor, which itself can trigger cytotoxicity, whereas on CD8⁺ T cells the function of NKG2D is to send co-stimulatory signals to activate them. NKG2D forms a homodimer whose ectodomains serve for ligand binding. This feature qualifies NKG2D as a non-variable-sequence-based binding domain in a miniGNC format and other binding domains can be added to create a class of multi-specific NKG2D-miniGNC protein. In one miniGNC format, individual NKG2D monomer was incorporated in the D3 position on chain A and chain B which formed a dimeric NKG2D receptor on Fc dimerization. Thus, NKG2D can act as a receptor for the multi-specific miniGNC molecule to bind its ligand. In other miniGNC format, a NKG2D tandem repeat was designed by adding a (GxSy)n spacer/linker between individual NKG2D monomers which homodimerizes and forms a functional dimeric receptor. This NKG2D tandem dimeric structure can be positioned in D1, D2, D4 or D5.

[0134] As listed in Table 7, this class includes mono-NKG2D-miniGNC (SI-49R26, SEQ ID NO. 153, 155), bi-miniGNC (SI-49R27, SEQ ID NO. 157, 159), tri-miniGNC (SI-49R25, SEQ ID NO. 161, 163), tetra-miniGNC (SI-49P_X, SEQ ID NO. 165, 167), and penta-mini-GNC molecules (SI49P8, SI-49P9, SEQ ID. NO. 169, 171, 177, and 179). A control penta-miniGNC, SI-49PM1 (SEQ ID NO. 173, 175), was created by switching the positions of D1 (αCD3) and D3 of SI-49P8, and the Octet binding affinity for either NKG2D or CD3 was not affected by this switch. While the binding affinity of other moiety 1 binding domains remained stable in this class of NKG2D-miniGNC molecules, the binding affinity of NKG2D was within 2-fold. Thus, the penta-miniGNC molecule possesses the binding function of NKG2D receptor for binding to NKG2D ligand.

[0135] To assess and compare the potency of TDCC of NKG2D-miniGNC molecules, tri-, tetra-, and penta-miniGNC molecules, SI-49R25, SI-49P_X, and SI-49P8 and SI-49PM1 were used to target MDA-MB-231 breast cancer cell line. Serial dilutions (0 to 30 nM; 1 to 5 dilution factor) of the miniGNC protein were added to a white 384-well plate containing luciferised MDA-MB-231 cells 24 hours prior and grown at 37° C. Activated T cells were plated immediately before miniGNC molecules (effector:target=15:1) in a total volume of 50 ul. After incubated for additional 72 hours, 20 ul of Bright-Glo (Promega) was added to wells, and the luminescence corresponding to viability of luciferised tumor cells was determined using a CLARIOstar plate reader. Data were fit to a sigmoidal function to calculate EC50 values (FIG. 7). Based on the dose-viability curves, there were two groups, the tetra- and penta-miniGNC molecules were more potent than the tri-miniGNC molecule, SI-49R25. As listed in Table 7, the difference might result from the addition of αPD-L1. However, the EC50 value (59.3 nM) of SI-49R25 should be considered as relatively potent. To the breast cancer cell line MDA-MB-231, CD19, which is a pan-B cell marker, is a non-participating tumor antigen. In this regard, SI-49R25 may be viewed as having two binding specificities to CD3 and NKG2D ligand. Thus, the data indicates that the incorporation of NKG2D receptor to different miniGNC antibody format contributes to the potency of TDCC. In a broader sense, the miniGNC antibody molecules can accommodate multiple binding specificities to modulate, cooperate, and direct an optimized immune response to targeted cells, such as cancer.

### TABLES

TABLE 1
The configuration, production, binding affinity, and potency
of multi-specific minGNC molecules when targeting EGFR
and/or HER3-expressing pancreatic cancer cells (BXPC3).

| | | | | | | | |
|---|---|---|---|---|---|---|---|
| Protein | D1/KD | D2/KD | D3/KD | D4/KD | D5/KD | Titer | EC50 |
| ID | (nM) | (nM) | (nM) | (nM) | (nM) | (μg/ml | (pM) |

Penta-miniGNC

| | | | | | | | |
|---|---|---|---|---|---|---|---|
| SI-75P6 | αCD3 | αHER3 | αEGFR | α4-1BB | αPDL-1 | 96.5 | 0.011 |
| | 36.2 | 138 | 5.56 | 37.3 | 1.45 | | |
| SI-75P4 | αEGFR | αHER3 | αCD3 | α4-1BBL | αPDL-1 | 48.4 | 0.102 |
| | 10.4 | 150 | 22.7 | 115 | 2.72 | | |
| SI-75P3 | αEGFR | αHER3 | αCD3 | α4-1BB | αPDL-1 | 39.4 | 1.300 |
| | 8.91 | 158 | 17.4 | 7.51 | 1 | | |
| SI-75P9 | αEGFR | αCD3 | αHER3 | α4-1BB | αPDL-1 | 30 | 0.160 |
| | 11.1 | 20.1 | 140 | 21.2 | 2.7 | | |

Tetra-miniGNC

| | | | | | | | |
|---|---|---|---|---|---|---|---|
| SI-75E1 | αEGFR | αHER3 | αCD3 | α4-1BB | — | 30.2 | 5.800 |
| | 8.9 | 185 | 20.3 | 17.8 | — | | |
| SI-75E2 | αEGFR | αHER3 | αCD3 | — | αPDL-1 | 172.3 | 0.085 |
| | 8.24 | 114 | 22.1 | — | 1.36 | | |

Tri-miniGNC

| | | | | | | | |
|---|---|---|---|---|---|---|---|
| SI-75X3 | αEGFR | αHER3 | αCD3 | | | 193.5 | 5417 |
| | 8.47 | 146 | 18.2 | — | — | | |
| SI-75X16 | αEGFR | αHER3 | αCD3* | | | 183.5 | 95540 |
| | 6.8 | 112.8 | 33.4 | — | — | | |
| SI-75X18 | | | αCD3* | αEGFR | αHER3 | 38.2 | 6090 |
| | | | 47.3 | 2.72 | 93.75 | | |

Bi-miniGNC

| | | | | | | | |
|---|---|---|---|---|---|---|---|
| SI-75X1 | αEGFR | | αCD3 | | | 246.1 | 0.71 |
| | 8.11 | | 24 | — | — | | |
| SI-75X2 | | αHER3 | αCD3 | | | 237.7 | 433.8 |
| | | 162 | 27.8 | — | — | | |
| SI-75X5 | | αHER3 | αCD3* | | | 192.9 | 9.095 |
| | | 139.2 | 44.4 | — | — | | |

TABLE 2
The effect of the position and binding affinity of the CD3
binding domain on the potency of penta-minGNC molecules when
targeting EGFR-expressing pancreatic cancer cells (BXPC3).

| Protein | D1/KD | D2/KD | D3/KD | D4/KD | D5/KD | Titer | EC50 |
|---|---|---|---|---|---|---|---|
| ID | (nM) | (nM) | (nM) | (nM) | (nM) | (μg/ml) | (pM) |
| SI-68P13 | αEGFR | αCD19 | αCD3 | α4-1BB | αPD-L1 | 35.1 | 0.09 |
| | 5.64 | 4.33 | 25.9 | 14.8 | 1.04 | | |
| SI-68P17 | αCD3 | αCD19 | αEGFR | α4-1BB | αPD-L1 | 40 | 0.6 |
| | 15.82 | 5.05 | 5.38 | 26.8 | 2.72 | | |
| SI-68P15 | αCD3** | αCD19 | αEGFR | α4-1BB | αPD-L1 | 58.1 | 0.16 |
| | 22.4 | 2.85 | 2.42 | 17.1 | 0.4 | | |
| SI-68P18 | αCD3*** | αCD19 | αEGFR | α4-1BB | αPD-L1 | 26 | 0.19 |
| | 14.46 | 1.35 | 8.18 | 7.51 | 1.00 | | |
| SI-68P19 | αCD3**** | αCD19 | αEGFR | α4-1BB | αPD-L1 | 28 | 0.12 |
| | 16.74 | 3.44 | 4.43 | 21.2 | 0.7 | | |
| SI-68P16 | αCD3***** | αCD19 | αEGFR | α4-1BB | αPD-L1 | 72 | 5.5 |
| | 60.6 | 2.55 | 2.41 | 23.3 | 0.5 | | |

TABLE 3
The effect of VHH single binding domain(s) on the potency of multi-
specific minGNC molecules when targeting BXPC3 tumor cells

| Protein | D1/KD | D2/KD | D3/KD | D4/KD | D5/KD | Titer | EC50 |
|---|---|---|---|---|---|---|---|
| ID | (nM) | (nM) | (nM) | (nM) | (nM) | (μg/ml) | (pM) |
| SI-75P5 | αEGFR VHH | αHER3 VHH | αCD3 | α4-1BB | αPD-L1 | 200.5 | 443 |
| | 23.5 | 4.68 | 26.1 | 23.3 | 3.25 | | |
| SI-75P8 | αEGFR VHH | αHER3 VHH | αCD3* | αEGFR | αHER3 | 295 | 967468000 |
| | 6.22 | 0.786 | 44.1 | 6.22 | 0.786 | | |
| SI-75X4 | αEGFR VHH | αHER3 VHH | αCD3 | — | — | 65.8 | 5766 |
| | 51.5 | 7.68 | 26.3 | — | — | | |
| SI-75X17 | αEGFR VHH | αHER3 VHH | αCD3* | — | — | 330 | No killing |
| | 14.8 | 4.58 | 68 | — | — | | |
| SI-75X19 | — | — | αCD3* | αEGFR VHH | αHER3 VHH | 223.4 | 1873 |
| | | | 64.4 | 20.6 | 10.52 | | |
| SI-75X9 | — | αHER3 VHH | αCD3* | — | — | 234 | 2584 |
| | — | 3.86 | 84.2 | — | — | | |
| SI-75X11 | αEGFR VHH | — | αCD3* | — | — | 214 | 564 |
| | 21.6 | — | 65.7 | — | — | | |
| SI-75X15 | — | — | αCD3* | — | αHER3 VHH | 161.3 | 27400 |
| | — | | 38.08 | — | 13.7 | | |
| SI-75X13 | — | — | αCD3* | αEGFR VHH | — | 165.6 | 4858 |
| | | — | 56 | 34− | — | | |

TABLE 4
The effect of “stapled” CD3 binding domain at D3 position
on the production of multi-specific miniGNC molecules.

| | | | D3 | | | | |
|---|---|---|---|---|---|---|---|
| | D1/KD | D2/KD | (Stapled)/ | D4/KD | D5/KD | | |
| Protein | (nM) | (nM) | KD (nM) | (nM) | (nM) | Titer | |
| ID | αCD20 | αCD19 | αCD3 | α4-1BB | αPD-L1 | (μg/ml) | % POI |
| SI-38P11 | 7.33 | 1.89 | 5.23 (No) | 14.8 | 1.1 | 80 | 69 |
| SI-76PM1 | 6.09 | 3.30 | 3.22 (Yes) | 22.43 | 1.47 | 129 | 75 |

TABLE 5
Comparative potency of multi-specific miniGNC molecules with “stapled”
scFv at all positions when targeting tumor cells.

| | D1 | D2 | | D4 | D5 | | |
|---|---|---|---|---|---|---|---|
| | (Stapled)/ | (Stapled)/ | D3/KD | (Stapled)/ | (Stapled)/ | | EC50 |
| Protein | KD (nM) | KD (nM) | (nM) | KD (nM) | KD (nM) | Titer | (pM) |
| ID | αEGFR* | αHER3 | αCD3 | α4-1BB | αPD-L1 | (μg/ml) | HPAF-II |
| SI-68X2 | <0.001 | 114.4 | 24.3 | — | — | 88.9 | 6.6 |
| SI-68E1 | <0.001 | 138.8 | 26.2 | 12.7 | — | 114.8 | 3.6 |
| SI-68E2 | <0.001 | 120 | 28.4 | — | 0.4 | 67 | 1.3 |
| SI-68P1 | <0.001 | 93.4 | 24.3 | 9.8 | 0.6 | 87.1 | 1.02 |
| | αCEA | αEGFR* | αCD3 | | | | MCF-7 |
| SI-68X1 | <0.001 | <0.001 | 14.3 | — | — | 69 | 4.2 |
| | αHER2 | — | αCD3 | | | | |
| SI-68X3 | NA | | NA | | | 57 | NA |

TABLE 6
Characterization of the unstapled versions of each domain
(D1-D5) in mAb or scFv format to respective antigens.

| Protein | Unstapled | Domain | Titer | KD |
|---|---|---|---|---|
| ID | Controls | Structure | (μg/ml) | (nM) |
| SI-1C3 | D1 = αEGFR* | mAb | 44.9 | <0.001 |
| SI-1C7 | D2 = αHER3 | Fc-scFv | 290.7 | 136.5 |
| SI-9C21 | D3 = αCD3 | mAb | 252.1 | 26.3 |
| SI-35FS11 | D4 = α4-1BB | Fc-ScFv | 7.67 | 14.9 |
| SI-3FS11 | D5 = αPD-L1 | Fc-ScFv | 18 | 0.94 |
| SI-20C14 | D1 = αCEA | mAb | NA | <0.001 |

TABLE 7
The characterization of multi-specific minGNC molecules with NKG2D
receptor dimer incorporated in miniGNC format and potency of tri,
tetra and penta molecules in killing MDA-MB-231 tumor cells

| Protein | D1/KD | D2/KD | D3/KD | D4/KD | D5/KD | Titer | EC50 |
|---|---|---|---|---|---|---|---|
| ID | (nM) | (nM) | (nM) | (nM) | (nM) | (μg/ml) | (pM) |
| SI-49R26 | — | — | NKG2D | — | — | 28 | n.a. |
| | — | — | 17.7− | — | — | | |
| SI-49R27 | αCD3 | — | NKG2D | — | — | 38.6 | n.a. |
| | 32.2 | — | 16 | — | — | | |
| SI-49R25 | αCD3 | αCD19 | NKG2D | — | — | 50 | 59330 |
| | 34.50 | 7.62 | 12.80 | — | — | | |
| SI-49P_X | αCD3 | αCD19 | NKG2D | — | αPD-L1 | 8.8 | 119.5 |
| | 30.45 | 1.31 | 10.4 | — | 0.2 | | |
| SI-49P8 | αCD3 | αCD19 | NKG2D | α4-1BB | αPD-L1 | 62.3 | 570.3 |
| | 36.3 | 2.98 | 24.3 | 7.71 | 1.08 | | |
| SI-49PM1 | NKG2D | αCD19 | αCD3 | α4-1BB | αPD-L1 | 30.3 | 946.5 |
| | 24.49 | 5.5 | 30.2 | 2.74 | 2.23 | | |
| SI-49P9 | αCD3 | αCD19 | NKG2D | 41BBL | αPD-L1 | 28.9 | n.a. |
| | 29.80 | 6.4 | 27.2 | 112 | 2.01 | | |

TABLE 8
The characterization of bispecific miniGNC molecules
with different IgG subtypes in the Fc domain.

| | IgG | | | | | | Titer | |
|---|---|---|---|---|---|---|---|---|
| Protein | subtype | D1 | D2 | D3 | D4 | D5 | (μg/ml) | % POI |
| SI-75X5 | IgG1 | — | αHER3 | αCD3* | — | — | 192.9 | 72.2 |
| SI-75XM9 | IgG4 | — | αHER3 | αCD3* | — | — | 150.5 | 85.6 |

TABLE 9
Annotation of binding domains for their binding specificity, domain
structure, origin, and sequence identification number (SEQ ID).

| | Binding | Structure in | | SEQ |
|---|---|---|---|---|
| Target | Domain | miniGNC | Origin | ID NO. |
| CD20 | Ritu | scFv | Rituximab | 259-262 |
| EGFR | EGFR | scFv and Fab | αEGFR H7 | 203-206 |
| EGFR | EGFR* | scFv | Panitumumab | 207-210 |
| HER3 | MM-111 | scFv and Fab | MM-111 | 255-258 |
| CD3 | αCD3 | scFv and Fab | 284A10 | 219-222 |
| CD3 | αCD3* | scFv and Fab | 283E3BSM | 227-230 |
| CD3 | αCD3** | scFv | 284A10 FR 1 | 231-234 |
| CD3 | αCD3*** | scFv | 284A10 FR 2 | 235-238 |
| CD3 | αCD3**** | scFv | 284A10 FR 3 | 239-242 |
| CD3 | αCD3***** | scFv | 283E3FRS | 291-294 |
| PD-L1 | αPD-L1 | scFv | PL221G5 | 243-246 |
| 4-1BB | α4-1BB | scFv | 466F6 | 247-250 |
| NKG2D | NKG2D | Receptor | | 253-254 |
| Ligand | | | | |
| 4-1BB | 41BBL | Ligand | | 251-252 |
| EGFR | αEGFR VHH | VHH | VHH-122 | 263-264 |
| HER3 | αHER3 VHH | VHH | VHH BCD090-M2 | 265-266 |
| CD19 | huBU12 | scFv | SI-huBU12-H4, | 215-218 |
| CEA | αCEA-H1 | scFv | CEA-656E11 | 279-282 |
| HER2 | Tras | scFv | Trastuzumab | 284-285 |
| | | Human IgG1 | | 313 |
| | | heavy chain | | |
| | | Human IgG4 | | 314 |
| | | light chain | | |

### SEQUENCE LISTING

| Sample | | SEQ ID NO. | | Fc ProA KO | VH3 ProA KO |
|---|---|---|---|---|---|
| ID | Chain | Protein | DNA | (H435R/Y436F) | (R19S) |
| SI-75X5 | A | 1 | 2 | + | + |
| | B | 3 | 4 | | |
| SI-75X6 | A | 5 | 6 | + | − |
| | B | 7 | 8 | | |
| SI-75X7 | A | 9 | 10 | − | + |
| | B | 11 | 12 | | |
| SI-75X8 | A | 13 | 14 | − | − |
| | B | 15 | 16 | | |
| SI-75P6 | A | 17 | 18 | + | + |
| | B | 19 | 20 | | |
| SI-75P4 | A | 21 | 22 | + | + |
| | B | 23 | 24 | | |
| SI-75P3 | A | 25 | 26 | + | + |
| | B | 27 | 28 | | |
| SI-75P9 | A | 29 | 30 | + | + |
| | B | 31 | 32 | | |
| SI-75E1 | A | 33 | 34 | + | + |
| | B | 35 | 36 | | |
| SI-75E2 | A | 37 | 38 | + | + |
| | B | 39 | 40 | | |
| SI-75X3 | A | 41 | 42 | + | + |
| | B | 43 | 44 | | |
| SI-75X16 | A | 45 | 46 | + | + |
| | B | 47 | 48 | | |
| SI-75X18 | A | 49 | 50 | + | + |
| | B | 51 | 52 | | |
| SI-75X1 | A | 53 | 54 | + | NA |
| | B | 55 | 56 | | |
| SI-75X2 | A | 57 | 58 | + | + |
| | B | 59 | 60 | | |
| SI-75O2 | A | 61 | 62 | + | NA |
| | B | 63 | 64 | | |
| SI-75O7 | A | 65 | 66 | + | NA |
| | B | 67 | 68 | | |
| SI-68P13 | A | 69 | 70 | + | + |
| | B | 71 | 72 | | |
| SI-68P17 | A | 73 | 74 | + | + |
| | B | 75 | 76 | | |
| SI-68P15 | A | 77 | 78 | + | + |
| | B | 79 | 80 | | |
| SI-68P18 | A | 81 | 82 | + | + |
| | B | 83 | 84 | | |
| SI-68P19 | A | 85 | 86 | + | + |
| | B | 87 | 88 | | |
| SI-68P16 | A | 89 | 90 | + | + |
| | B | 91 | 92 | | |
| SI-75P5 | A | 93 | 94 | + | + |
| | B | 95 | 96 | | |
| SI-75P8 | A | 97 | 98 | + | + |
| | B | 99 | 100 | | |
| SI-75X4 | A | 101 | 102 | + | NA |
| | B | 103 | 104 | | |
| SI-75X17 | A | 105 | 106 | + | NA |
| | B | 107 | 108 | | |
| SI-75X19 | A | 109 | 110 | + | NA |
| | B | 111 | 112 | | |
| SI-75X9 | A | 113 | 114 | + | NA |
| | B | 115 | 116 | | |
| SI-75X11 | A | 117 | 118 | + | NA |
| | B | 119 | 120 | | |
| SI-75X15 | A | 121 | 122 | + | NA |
| | B | 123 | 124 | | |
| SI-75X13 | A | 125 | 126 | + | NA |
| | B | 127 | 128 | | |
| SI-38P11 | A | 129 | 130 | + | + |
| | B | 131 | 132 | | |
| SI-76PM1 | A | 133 | 134 | + | + |
| | B | 135 | 136 | | |
| SI-68X1 | A | 195 | 196 | − | − |
| | B | 197 | 198 | | |
| SI-68X3 | A | 199 | 200 | − | − |
| | B | 201 | 202 | | |
| SI-68X2 | A | 137 | 138 | − | − |
| | B | 139 | 140 | | |
| SI-68E1 | A | 141 | 142 | − | − |
| | B | 143 | 144 | | |
| SI-68E2 | A | 145 | 146 | − | − |
| | B | 147 | 148 | | |
| SI-68P1 | A | 149 | 150 | − | − |
| | B | 151 | 152 | | |
| SI-49R26 | A | 153 | 154 | + | NA |
| | B | 155 | 156 | | |
| SI-49R27 | A | 157 | 158 | + | NA |
| | B | 159 | 160 | | |
| SI-49R25 | A | 161 | 162 | − | − |
| | B | 163 | 164 | | |
| SI-49P_X | A | 165 | 166 | − | − |
| | B | 167 | 168 | | |
| SI-49P8 | A | 169 | 170 | − | − |
| | B | 171 | 172 | | |
| SI-49PM1 | A | 173 | 174 | + | + |
| | B | 175 | 176 | | |
| SI-49P9 | A | 177 | 178 | − | − |
| | B | 179 | 180 | | |
| SI-75XM9 | A | 297 | 298 | + | + |
| | B | 299 | 300 | | |

SEQ ID NO.

| Protein ID | Format | Protein | Protein |
|---|---|---|---|
| SI-1C3 HC | αEGFR mAb | 181 | 182 |
| SI-1C3 LC | αEGFR mAb | 183 | 184 |
| SI-1C7 | αHER3 Fc-scFv | 185 | 186 |
| SI-9C21 HC | αCD3 mAb | 187 | 188 |
| SI-9C21 LC | αCD3 mAb | 189 | 190 |
| SI-35FS11 | α4-1BB Fc-scFv | 191 | 192 |
| SI-3FS11 | αPD-L1 Fc-SCFv | 193 | 194 |
| SI-20C14 HC | αCEA mAb 656E11 | 287 | 288 |
| SI-20C14 LC | αCEA mAb 656E11 | 289 | 290 |

| | |
|---|---|
| Variable | SEQ ID |

| Domains | Chains | Protein | DNA |
|---|---|---|---|
| αEGFR | VH | 203 | 204 |
| | VL | 205 | 206 |
| αEGFR * | VH | 207 | 208 |
| | VL | 209 | 210 |
| αEGFR * Stapled | VH | 211 | 212 |
| | VL | 213 | 214 |
| αCD19 | VH | 215 | 216 |
| | VL | 217 | 218 |
| αCD3 | VH | 219 | 220 |
| | VL | 221 | 222 |
| αCD3 Stapled | VH | 223 | 224 |
| | VL | 225 | 226 |
| αCD3 * | VH | 227 | 228 |
| | VL | 229 | 230 |
| αCD3 ** | VH | 231 | 232 |
| | VL | 233 | 234 |
| αCD3 *** | VH | 235 | 236 |
| | VL | 237 | 238 |
| αCD3 **** | VH | 239 | 240 |
| | VL | 241 | 242 |
| αPDL1 | VH | 243 | 244 |
| | VL | 245 | 246 |
| α41BB | VH | 247 | 248 |
| | VL | 249 | 250 |
| 41BBL | NA | 251 | 252 |
| NKG2D dimer | NA | 253 | 254 |
| αHER3 | VH | 255 | 256 |
| | VL | 257 | 258 |
| αCD20 | VH | 259 | 260 |
| | VL | 261 | 262 |
| EGFR VHH | VHH | 263 | 264 |
| HER3 VHH | VHH | 265 | 266 |
| αPDL1 Stapled | VH | 267 | 268 |
| | VL | 269 | 270 |
| α41BB stapled | VH | 271 | 272 |
| | VL | 273 | 274 |
| αHER3 stapled | VH | 275 | 276 |
| | VL | 277 | 278 |
| αCEA | VH | 279 | 280 |
| | VL | 281 | 282 |
| αHER2 stapled | VH | 283 | 284 |
| | VL | 285 | 286 |
| αCD3 ***** | VH | 291 | 292 |
| | VL | 293 | 294 |
| NKG2D monomer | NA | 295 | 296 |

| Antibody | Kabat CDR | AA SEQ ID |
|---|---|---|
| αCEA 656E11 | CDR-H1 | 301 |
| | CDR-H2 | 302 |
| | CDR-H3 | 303 |
| | CDR-L1 | 304 |
| | CDR-L2 | 305 |
| | CDR-L3 | 306 |
| αCD3 283E3 | CDR-H1 | 307 |
| (BSM/FRS) | CDR-H2 | 308 |
| | CDR-H3 | 309 |
| | CDR-L1 | 310 |
| | CDR-L2 | 311 |
| | CDR-L3 | 312 |

>Sequence ID 1: SI-75X5 Chain A Amino Acid Sequence
QVQLQESGGRLVQPGEPLSLTCKTSGIDLSSNAIGWVRQAPGKGLEWIGVIFGSGNTYYASWAKGRFTISRSTSTVY
LKMNSLRSEDTAIYYCARGGYSSDIWGQGTLVTVSSASTKGPSVFPLAPSSKSTSGGTAALGCLVKDYFPEPVTVSW
NSGALTSGVHTFPAVLQSSGLYSLSSVVTVPSSSLGTQTYICNVNHKPSNTKVDKRVEPKSCDKTHTCPPCPAPEAA
GGPSVFLFPPKPKDTLMISRTPEVTCVVVDVSHEDPEVKFNWYVDGVEVHNAKTKPREEQYNSTYRVVSVLTVLHQD
WLNGKEYKCAVSNKALPAPIEKTISKAKGQPREPQVYTLPPSRDELTKNQVSLSCAVKGFYPSDIAVEWESNGQPEN
NYKTTPPVLDSDGSFFLVSKLTVDKSRWQQGNVFSCSVMHEALHNHYTQKSLSLSPG
>Sequence ID 2: SI-75X5 Chain A Nucleotide Sequence
CAAGTGCAGTTGCAAGAAAGTGGTGGTAGACTGGTTCAGCCTGGTGAACCCTTGTCACTGACGTGTAAAACAAGCGG
CATTGATCTGTCCTCTAACGCCATCGGATGGGTCCGACAGGCCCCAGGAAAAGGTCTGGAGTGGATCGGAGTTATCT
TCGGGAGCGGCAATACATACTACGCAAGCTGGGCAAAAGGGCGATTTACGATATCACGGAGCACCTCTACAGTTTAT
TTGAAAATGAACTCCCTCCGGTCCGAGGATACCGCGATATATTACTGTGCCAGAGGGGGGTACTCCTCTGATATCTG
GGGGCAGGGTACACTGGTTACAGTTTCATCCGCTAGCACCAAAGGCCCCTCTGTGTTCCCTCTGGCCCCCTCCTCCA
AGAGCACCTCTGGAGGCACTGCTGCCCTGGGCTGCCTGGTGAAGGACTACTTCCCAGAGCCTGTGACTGTGTCCTGG
AACTCTGGAGCCCTGACCTCTGGAGTGCACACCTTCCCTGCTGTGCTGCAGAGCTCTGGCCTCTACAGCCTGTCCTC
TGTGGTCACTGTGCCCTCCTCCAGCCTGGGCACCCAGACCTACATCTGCAATGTGAACCACAAGCCCTCCAACACCA
AGGTGGACAAGAGAGTGGAGCCCAAGTCCTGTGACAAGACCCACACCTGCCCTCCCTGCCCAGCCCCAGAGGCTGCT
GGAGGCCCCTCTGTGTTCCTCTTCCCTCCCAAGCCCAAGGACACCCTGATGATCTCCAGGACCCCAGAAGTCACCTG
TGTGGTGGTGGATGTGTCCCATGAAGACCCAGAAGTGAAGTTCAACTGGTATGTGGATGGAGTGGAGGTGCACAATG
CCAAGACCAAGCCCAGAGAAGAGCAGTACAACTCCACCTACCGAGTGGTGTCTGTGCTGACTGTGCTGCACCAGGAC
TGGCTGAATGGGAAGGAGTACAAGTGTGCTGTGTCCAACAAGGCCCTGCCTGCCCCCATTGAGAAGACCATCTCCAA
GGCCAAGGGCCAGCCCAGAGAGCCCCAGGTCTACACCCTGCCTCCCTCCAGAGATGAGCTGACCAAGAACCAGGTGT
CCCTGTCCTGTGCTGTGAAAGGCTTCTACCCCAGTGACATTGCTGTGGAGTGGGAGAGCAATGGCCAGCCAGAGAAC
AACTACAAGACCACCCCTCCTGTGCTGGACTCTGATGGCTCCTTCTTCCTGGTCTCCAAGCTGACTGTGGACAAGAG
CCGCTGGCAGCAGGGCAATGTGTTCTCCTGCTCTGTCATGCATGAGGCCCTGCACAACCACTACACCCAGAAGAGCC
TGAGCCTGAGCCCTGGA
>Sequence ID 3: SI-75X5 Chain B Amino Acid Sequence
QSALTQPASVSGSPGQSITISCTGTSSDVGGYNFVSWYQQHPGKAPKLMIYDVSDRPSGVSDRFSGSKSGNTASLII
SGLQADDEADYYCSSYGSSSTHVIFGGGTKVTVLGGGGSGGGGSGGGGSGGGGSQVQLQESGGGLVKPGGSLSLSCA
ASGFTFSSYWMSWVRQAPGKGLEWVANINRDGSASYYVDSVKGRFTISRDDAKNSLYLQMNSLRAEDTAVYYCARDR
GVGYFDLWGRGTLVTVSSGGGGSGGGGSDPQLTQSPSSLSATVGQRVTINCQSSQSVAKNNNLAWFQQKPGKPPKLL
IYSASTLAAGVPSRFSGSGSGTQFTLTITRVQSEDFATYYCSARDSGNIQSFGGGTRVEIKRTVAAPSVFIFPPSDE
QLKSGTASVVCLLNNFYPREAKVQWKVDNALQSGNSQESVTEQDSKDSTYSLSSTLTLSKADYEKHKVYACEVTHQG
LSSPVTKSFNRGECGGDKTHTCPPCPAPEAAGGPSVFLFPPKPKDTLMISRTPEVTCVVVDVSHEDPEVKFNWYVDG
VEVHNAKTKPREEQYNSTYRVVSVLTVLHQDWLNGKEYKCAVSNKALPAPIEKTISKAKGQPREPQVYTLPPSRDEL
TKNQVSLWCLVKGFYPSDIAVEWESNGQPENNYKTTPPVLDSDGSFFLYSKLTVDKSRWQQGNVFSCSVMHEALHNR
FTQKSLSLSPG
>Sequence ID 4: SI-75X5 Chain B Nucleotide Sequence
CAGTCTGCCCTGACTCAGCCTGCCTCCGTGTCTGGGTCTCCTGGACAGTCGATCACCATCTCCTGCACTGGAACCAG
CAGTGACGTTGGTGGTTATAACTTTGTCTCCTGGTACCAACAACACCCAGGCAAAGCCCCCAAACTCATGATCTATG
ATGTCAGTGATCGGCCCTCAGGGGTGTCTGATCGCTTCTCCGGCTCCAAGTCTGGCAACACGGCCTCCCTGATCATC
TCTGGCCTCCAGGCTGACGACGAGGCTGATTATTACTGCAGCTCATATGGGAGCAGCAGCACTCATGTGATTTTCGG
CGGAGGGACCAAGGTGACCGTCCTAGGCGGTGGCGGTAGTGGGGGAGGCGGTTCTGGCGGCGGAGGGTCCGGCGGTG
GAGGATCACAGGTGCAATTGCAGGAGTCGGGGGGAGGCCTGGTCAAGCCTGGAGGGTCCCTGAGCCTCTCCTGTGCA
GCCTCTGGATTCACCTTTAGTAGTTATTGGATGAGCTGGGTCCGCCAGGCTCCAGGGAAGGGGCTGGAGTGGGTGGC
CAACATAAACCGCGATGGAAGTGCGAGTTACTATGTGGACTCTGTGAAGGGCCGATTCACCATCTCCAGAGACGACG
CCAAGAACTCACTGTATCTGCAAATGAACAGCCTGAGAGCTGAGGACACGGCTGTGTATTACTGTGCGAGAGATCGT
GGGGTGGGCTACTTCGATCTCTGGGGCCGTGGCACCCTGGTCACCGTCTCGAGTGGCGGTGGAGGGTCCGGCGGTGG
TGGATCAGATCCTCAATTGACCCAGTCCCCTAGTAGCCTTTCTGCAACCGTGGGCCAGAGGGTAACAATCAATTGCC
AGTCAAGCCAGTCCGTAGCGAAGAATAATAATTTGGCATGGTTCCAACAAAAACCGGGTAAACCTCCTAAACTCCTT
ATCTACTCAGCTTCAACCCTTGCCGCGGGTGTGCCCAGCCGGTTCTCAGGCTCAGGTTCCGGGACTCAATTTACACT
TACCATCACTCGCGTCCAAAGTGAGGATTTTGCAACCTACTATTGTTCTGCACGGGATTCCGGGAACATACAGTCCT
TTGGGGGTGGAACTCGGGTGGAGATAAAACGTACGGTGGCTGCCCCCTCTGTGTTCATCTTCCCACCCAGTGATGAG
CAGCTGAAGAGTGGCACAGCCTCTGTGGTGTGCCTGCTCAACAACTTCTACCCCAGAGAAGCCAAGGTGCAGTGGAA
GGTGGACAATGCCCTGCAGAGTGGCAACAGCCAGGAGAGTGTGACAGAGCAGGACAGCAAGGACAGCACCTACAGCC
TGTCCTCCACCCTGACCCTGTCCAAGGCTGACTATGAGAAGCACAAGGTGTATGCCTGTGAGGTGACCCACCAGGGC
CTGAGCAGCCCTGTGACCAAGAGCTTCAACCGAGGAGAGTGTGGAGGAGACAAGACCCACACCTGCCCTCCCTGCCC
AGCCCCAGAAGCTGCTGGAGGCCCCTCTGTGTTCCTCTTCCCTCCCAAGCCCAAGGACACCCTGATGATCTCCAGGA
CCCCAGAAGTCACCTGTGTGGTGGTGGATGTGTCCCATGAAGACCCAGAAGTGAAGTTCAACTGGTATGTGGATGGA
GTGGAAGTGCACAATGCCAAGACCAAGCCCAGAGAAGAGCAGTACAACAGCACCTACCGAGTGGTGTCTGTGCTGAC
TGTGCTGCACCAGGACTGGCTGAATGGGAAGGAGTACAAGTGTGCTGTGTCCAACAAGGCCCTGCCTGCCCCCATTG
AGAAGACCATCTCCAAGGCCAAGGGCCAGCCCAGAGAGCCCCAGGTCTACACCCTGCCTCCCTCCAGAGATGAGCTG
ACCAAGAACCAGGTGTCCCTGTGGTGCCTGGTGAAAGGCTTCTACCCCAGTGACATTGCTGTGGAGTGGGAGAGCAA
TGGCCAGCCAGAGAACAACTACAAGACCACCCCTCCTGTGCTGGACTCTGATGGCTCCTTCTTCCTGTACAGCAAGC
TGACTGTGGACAAGAGCCGCTGGCAGCAGGGCAATGTGTTCTCCTGCTCTGTCATGCATGAGGCCCTGCACAACCGC
TTCACCCAGAAGAGCCTGAGCCTGAGCCCTGGA
>Sequence ID 5: SI-75X6 Chain A Amino Acid Sequence
QVQLQESGGRLVQPGEPLSLTCKTSGIDLSSNAIGWVRQAPGKGLEWIGVIFGSGNTYYASWAKGRFTISRSTSTVY
LKMNSLRSEDTAIYYCARGGYSSDIWGQGTLVTVSSASTKGPSVFPLAPSSKSTSGGTAALGCLVKDYFPEPVTVSW
NSGALTSGVHTFPAVLQSSGLYSLSSVVTVPSSSLGTQTYICNVNHKPSNTKVDKRVEPKSCDKTHTCPPCPAPEAA
GGPSVFLFPPKPKDTLMISRTPEVTCVVVDVSHEDPEVKFNWYVDGVEVHNAKTKPREEQYNSTYRVVSVLTVLHQD
WLNGKEYKCAVSNKALPAPIEKTISKAKGQPREPQVYTLPPSRDELTKNQVSLSCAVKGFYPSDIAVEWESNGQPEN
NYKTTPPVLDSDGSFFLVSKLTVDKSRWQQGNVFSCSVMHEALHNHYTQKSLSLSPG
>Sequence ID 6: SI-75X6 Chain A Nucleotide Sequence
CAAGTGCAGTTGCAAGAAAGTGGTGGTAGACTGGTTCAGCCTGGTGAACCCTTGTCACTGACGTGTAAAACAAGCGG
CATTGATCTGTCCTCTAACGCCATCGGATGGGTCCGACAGGCCCCAGGAAAAGGTCTGGAGTGGATCGGAGTTATCT
TCGGGAGCGGCAATACATACTACGCAAGCTGGGCAAAAGGGCGATTTACGATATCACGGAGCACCTCTACAGTTTAT
TTGAAAATGAACTCCCTCCGGTCCGAGGATACCGCGATATATTACTGTGCCAGAGGGGGGTACTCCTCTGATATCTG
GGGGCAGGGTACACTGGTTACAGTTTCATCCGCTAGCACCAAAGGCCCCTCTGTGTTCCCTCTGGCCCCCTCCTCCA
AGAGCACCTCTGGAGGCACTGCTGCCCTGGGCTGCCTGGTGAAGGACTACTTCCCAGAGCCTGTGACTGTGTCCTGG
AACTCTGGAGCCCTGACCTCTGGAGTGCACACCTTCCCTGCTGTGCTGCAGAGCTCTGGCCTCTACAGCCTGTCCTC
TGTGGTCACTGTGCCCTCCTCCAGCCTGGGCACCCAGACCTACATCTGCAATGTGAACCACAAGCCCTCCAACACCA
AGGTGGACAAGAGAGTGGAGCCCAAGTCCTGTGACAAGACCCACACCTGCCCTCCCTGCCCAGCCCCAGAGGCTGCT
GGAGGCCCCTCTGTGTTCCTCTTCCCTCCCAAGCCCAAGGACACCCTGATGATCTCCAGGACCCCAGAAGTCACCTG
TGTGGTGGTGGATGTGTCCCATGAAGACCCAGAAGTGAAGTTCAACTGGTATGTGGATGGAGTGGAGGTGCACAATG
CCAAGACCAAGCCCAGAGAAGAGCAGTACAACTCCACCTACCGAGTGGTGTCTGTGCTGACTGTGCTGCACCAGGAC
TGGCTGAATGGGAAGGAGTACAAGTGTGCTGTGTCCAACAAGGCCCTGCCTGCCCCCATTGAGAAGACCATCTCCAA
GGCCAAGGGCCAGCCCAGAGAGCCCCAGGTCTACACCCTGCCTCCCTCCAGAGATGAGCTGACCAAGAACCAGGTGT
CCCTGTCCTGTGCTGTGAAAGGCTTCTACCCCAGTGACATTGCTGTGGAGTGGGAGAGCAATGGCCAGCCAGAGAAC
AACTACAAGACCACCCCTCCTGTGCTGGACTCTGATGGCTCCTTCTTCCTGGTCTCCAAGCTGACTGTGGACAAGAG
CCGCTGGCAGCAGGGCAATGTGTTCTCCTGCTCTGTCATGCATGAGGCCCTGCACAACCACTACACCCAGAAGAGCC
TGAGCCTGAGCCCTGGA
>Sequence ID 7: SI-75X6 Chain B Amino Acid Sequence
QSALTQPASVSGSPGQSITISCTGTSSDVGGYNFVSWYQQHPGKAPKLMIYDVSDRPSGVSDRFSGSKSGNTASLII
SGLQADDEADYYCSSYGSSSTHVIFGGGTKVTVLGGGGSGGGGSGGGGSGGGGSQVQLQESGGGLVKPGGSLRLSCA
ASGFTFSSYWMSWVRQAPGKGLEWVANINRDGSASYYVDSVKGRFTISRDDAKNSLYLQMNSLRAEDTAVYYCARDR
GVGYFDLWGRGTLVTVSSGGGGSGGGGSDPQLTQSPSSLSATVGQRVTINCQSSQSVAKNNNLAWFQQKPGKPPKLL
IYSASTLAAGVPSRFSGSGSGTQFTLTITRVQSEDFATYYCSARDSGNIQSFGGGTRVEIKRTVAAPSVFIFPPSDE
QLKSGTASVVCLLNNFYPREAKVQWKVDNALQSGNSQESVTEQDSKDSTYSLSSTLTLSKADYEKHKVYACEVTHQG
LSSPVTKSFNRGECGGDKTHTCPPCPAPEAAGGPSVFLFPPKPKDTLMISRTPEVTCVVVDVSHEDPEVKFNWYVDG
VEVHNAKTKPREEQYNSTYRVVSVLTVLHQDWLNGKEYKCAVSNKALPAPIEKTISKAKGQPREPQVYTLPPSRDEL
TKNQVSLWCLVKGFYPSDIAVEWESNGQPENNYKTTPPVLDSDGSFFLYSKLTVDKSRWQQGNVFSCSVMHEALHNR
FTQKSLSLSPG
>Sequence ID 8: SI-75X6 Chain B Nucleotide Sequence
CAGTCTGCCCTGACTCAGCCTGCCTCCGTGTCTGGGTCTCCTGGACAGTCGATCACCATCTCCTGCACTGGAACCAG
CAGTGACGTTGGTGGTTATAACTTTGTCTCCTGGTACCAACAACACCCAGGCAAAGCCCCCAAACTCATGATCTATG
ATGTCAGTGATCGGCCCTCAGGGGTGTCTGATCGCTTCTCCGGCTCCAAGTCTGGCAACACGGCCTCCCTGATCATC
TCTGGCCTCCAGGCTGACGACGAGGCTGATTATTACTGCAGCTCATATGGGAGCAGCAGCACTCATGTGATTTTCGG
CGGAGGGACCAAGGTGACCGTCCTAGGCGGTGGCGGTAGTGGGGGAGGCGGTTCTGGCGGCGGAGGGTCCGGCGGTG
GAGGATCACAGGTGCAATTGCAGGAGTCGGGGGGAGGCCTGGTCAAGCCTGGAGGGTCCCTGAGACTCTCCTGTGCA
GCCTCTGGATTCACCTTTAGTAGTTATTGGATGAGCTGGGTCCGCCAGGCTCCAGGGAAGGGGCTGGAGTGGGTGGC
CAACATAAACCGCGATGGAAGTGCGAGTTACTATGTGGACTCTGTGAAGGGCCGATTCACCATCTCCAGAGACGACG
CCAAGAACTCACTGTATCTGCAAATGAACAGCCTGAGAGCTGAGGACACGGCTGTGTATTACTGTGCGAGAGATCGT
GGGGTGGGCTACTTCGATCTCTGGGGCCGTGGCACCCTGGTCACCGTCTCGAGTGGCGGTGGAGGGTCCGGCGGTGG
TGGATCAGATCCTCAATTGACCCAGTCCCCTAGTAGCCTTTCTGCAACCGTGGGCCAGAGGGTAACAATCAATTGCC
AGTCAAGCCAGTCCGTAGCGAAGAATAATAATTTGGCATGGTTCCAACAAAAACCGGGTAAACCTCCTAAACTCCTT
ATCTACTCAGCTTCAACCCTTGCCGCGGGTGTGCCCAGCCGGTTCTCAGGCTCAGGTTCCGGGACTCAATTTACACT
TACCATCACTCGCGTCCAAAGTGAGGATTTTGCAACCTACTATTGTTCTGCACGGGATTCCGGGAACATACAGTCCT
TTGGGGGTGGAACTCGGGTGGAGATAAAACGTACGGTGGCTGCCCCCTCTGTGTTCATCTTCCCACCCAGTGATGAG
CAGCTGAAGAGTGGCACAGCCTCTGTGGTGTGCCTGCTCAACAACTTCTACCCCAGAGAAGCCAAGGTGCAGTGGAA
GGTGGACAATGCCCTGCAGAGTGGCAACAGCCAGGAGAGTGTGACAGAGCAGGACAGCAAGGACAGCACCTACAGCC
TGTCCTCCACCCTGACCCTGTCCAAGGCTGACTATGAGAAGCACAAGGTGTATGCCTGTGAGGTGACCCACCAGGGC
CTGAGCAGCCCTGTGACCAAGAGCTTCAACCGAGGAGAGTGTGGAGGAGACAAGACCCACACCTGCCCTCCCTGCCC
AGCCCCAGAAGCTGCTGGAGGCCCCTCTGTGTTCCTCTTCCCTCCCAAGCCCAAGGACACCCTGATGATCTCCAGGA
CCCCAGAAGTCACCTGTGTGGTGGTGGATGTGTCCCATGAAGACCCAGAAGTGAAGTTCAACTGGTATGTGGATGGA
GTGGAAGTGCACAATGCCAAGACCAAGCCCAGAGAAGAGCAGTACAACAGCACCTACCGAGTGGTGTCTGTGCTGAC
TGTGCTGCACCAGGACTGGCTGAATGGGAAGGAGTACAAGTGTGCTGTGTCCAACAAGGCCCTGCCTGCCCCCATTG
AGAAGACCATCTCCAAGGCCAAGGGCCAGCCCAGAGAGCCCCAGGTCTACACCCTGCCTCCCTCCAGAGATGAGCTG
ACCAAGAACCAGGTGTCCCTGTGGTGCCTGGTGAAAGGCTTCTACCCCAGTGACATTGCTGTGGAGTGGGAGAGCAA
TGGCCAGCCAGAGAACAACTACAAGACCACCCCTCCTGTGCTGGACTCTGATGGCTCCTTCTTCCTGTACAGCAAGC
TGACTGTGGACAAGAGCCGCTGGCAGCAGGGCAATGTGTTCTCCTGCTCTGTCATGCATGAGGCCCTGCACAACCGC
TTCACCCAGAAGAGCCTGAGCCTGAGCCCTGGA
>Sequence ID 9: SI-75X7 Chain A Amino Acid Sequence
QVQLQESGGRLVQPGEPLSLTCKTSGIDLSSNAIGWVRQAPGKGLEWIGVIFGSGNTYYASWAKGRFTISRSTSTVY
LKMNSLRSEDTAIYYCARGGYSSDIWGQGTLVTVSSASTKGPSVFPLAPSSKSTSGGTAALGCLVKDYFPEPVTVSW
NSGALTSGVHTFPAVLQSSGLYSLSSVVTVPSSSLGTQTYICNVNHKPSNTKVDKRVEPKSCDKTHTCPPCPAPEAA
GGPSVFLFPPKPKDTLMISRTPEVTCVVVDVSHEDPEVKFNWYVDGVEVHNAKTKPREEQYNSTYRVVSVLTVLHQD
WLNGKEYKCAVSNKALPAPIEKTISKAKGQPREPQVYTLPPSRDELTKNQVSLSCAVKGFYPSDIAVEWESNGQPEN
NYKTTPPVLDSDGSFFLVSKLTVDKSRWQQGNVFSCSVMHEALHNHYTQKSLSLSPG
>Sequence ID 10: SI-75X7 Chain A Nucleotide Sequence
CAAGTGCAGTTGCAAGAAAGTGGTGGTAGACTGGTTCAGCCTGGTGAACCCTTGTCACTGACGTGTAAAACAAGCGG
CATTGATCTGTCCTCTAACGCCATCGGATGGGTCCGACAGGCCCCAGGAAAAGGTCTGGAGTGGATCGGAGTTATCT
TCGGGAGCGGCAATACATACTACGCAAGCTGGGCAAAAGGGCGATTTACGATATCACGGAGCACCTCTACAGTTTAT
TTGAAAATGAACTCCCTCCGGTCCGAGGATACCGCGATATATTACTGTGCCAGAGGGGGGTACTCCTCTGATATCTG
GGGGCAGGGTACACTGGTTACAGTTTCATCCGCTAGCACCAAAGGCCCCTCTGTGTTCCCTCTGGCCCCCTCCTCCA
AGAGCACCTCTGGAGGCACTGCTGCCCTGGGCTGCCTGGTGAAGGACTACTTCCCAGAGCCTGTGACTGTGTCCTGG
AACTCTGGAGCCCTGACCTCTGGAGTGCACACCTTCCCTGCTGTGCTGCAGAGCTCTGGCCTCTACAGCCTGTCCTC
TGTGGTCACTGTGCCCTCCTCCAGCCTGGGCACCCAGACCTACATCTGCAATGTGAACCACAAGCCCTCCAACACCA
AGGTGGACAAGAGAGTGGAGCCCAAGTCCTGTGACAAGACCCACACCTGCCCTCCCTGCCCAGCCCCAGAGGCTGCT
GGAGGCCCCTCTGTGTTCCTCTTCCCTCCCAAGCCCAAGGACACCCTGATGATCTCCAGGACCCCAGAAGTCACCTG
TGTGGTGGTGGATGTGTCCCATGAAGACCCAGAAGTGAAGTTCAACTGGTATGTGGATGGAGTGGAGGTGCACAATG
CCAAGACCAAGCCCAGAGAAGAGCAGTACAACTCCACCTACCGAGTGGTGTCTGTGCTGACTGTGCTGCACCAGGAC
TGGCTGAATGGGAAGGAGTACAAGTGTGCTGTGTCCAACAAGGCCCTGCCTGCCCCCATTGAGAAGACCATCTCCAA
GGCCAAGGGCCAGCCCAGAGAGCCCCAGGTCTACACCCTGCCTCCCTCCAGAGATGAGCTGACCAAGAACCAGGTGT
CCCTGTCCTGTGCTGTGAAAGGCTTCTACCCCAGTGACATTGCTGTGGAGTGGGAGAGCAATGGCCAGCCAGAGAAC
AACTACAAGACCACCCCTCCTGTGCTGGACTCTGATGGCTCCTTCTTCCTGGTCTCCAAGCTGACTGTGGACAAGAG
CCGCTGGCAGCAGGGCAATGTGTTCTCCTGCTCTGTCATGCATGAGGCCCTGCACAACCACTACACCCAGAAGAGCC
TGAGCCTGAGCCCTGGA
>Sequence ID 11: SI-75X7 Chain B Amino Acid Sequence
QSALTQPASVSGSPGQSITISCTGTSSDVGGYNFVSWYQQHPGKAPKLMIYDVSDRPSGVSDRFSGSKSGNTASLII
SGLQADDEADYYCSSYGSSSTHVIFGGGTKVTVLGGGGSGGGGSGGGGSGGGGSQVQLQESGGGLVKPGGSLSLSCA
ASGFTFSSYWMSWVRQAPGKGLEWVANINRDGSASYYVDSVKGRFTISRDDAKNSLYLQMNSLRAEDTAVYYCARDR
GVGYFDLWGRGTLVTVSSGGGGSGGGGSDPQLTQSPSSLSATVGQRVTINCQSSQSVAKNNNLAWFQQKPGKPPKLL
IYSASTLAAGVPSRFSGSGSGTQFTLTITRVQSEDFATYYCSARDSGNIQSFGGGTRVEIKRTVAAPSVFIFPPSDE
QLKSGTASVVCLLNNFYPREAKVQWKVDNALQSGNSQESVTEQDSKDSTYSLSSTLTLSKADYEKHKVYACEVTHQG
LSSPVTKSFNRGECGGDKTHTCPPCPAPEAAGGPSVFLFPPKPKDTLMISRTPEVTCVVVDVSHEDPEVKFNWYVDG
VEVHNAKTKPREEQYNSTYRVVSVLTVLHQDWLNGKEYKCAVSNKALPAPIEKTISKAKGQPREPQVYTLPPSRDEL
TKNQVSLWCLVKGFYPSDIAVEWESNGQPENNYKTTPPVLDSDGSFFLYSKLTVDKSRWQQGNVFSCSVMHEALHNH
YTQKSLSLSPG
>Sequence ID 12: SI-75X7 Chain B Amino Acid Sequence
CAGTCTGCCCTGACTCAGCCTGCCTCCGTGTCTGGGTCTCCTGGACAGTCGATCACCATCTCCTGCACTGGAACCAG
CAGTGACGTTGGTGGTTATAACTTTGTCTCCTGGTACCAACAACACCCAGGCAAAGCCCCCAAACTCATGATCTATG
ATGTCAGTGATCGGCCCTCAGGGGTGTCTGATCGCTTCTCCGGCTCCAAGTCTGGCAACACGGCCTCCCTGATCATC
TCTGGCCTCCAGGCTGACGACGAGGCTGATTATTACTGCAGCTCATATGGGAGCAGCAGCACTCATGTGATTTTCGG
CGGAGGGACCAAGGTGACCGTCCTAGGCGGTGGCGGTAGTGGGGGAGGCGGTTCTGGCGGCGGAGGGTCCGGCGGTG
GAGGATCACAGGTGCAATTGCAGGAGTCGGGGGGAGGCCTGGTCAAGCCTGGAGGGTCCCTGAGCCTCTCCTGTGCA
GCCTCTGGATTCACCTTTAGTAGTTATTGGATGAGCTGGGTCCGCCAGGCTCCAGGGAAGGGGCTGGAGTGGGTGGC
CAACATAAACCGCGATGGAAGTGCGAGTTACTATGTGGACTCTGTGAAGGGCCGATTCACCATCTCCAGAGACGACG
CCAAGAACTCACTGTATCTGCAAATGAACAGCCTGAGAGCTGAGGACACGGCTGTGTATTACTGTGCGAGAGATCGT
GGGGTGGGCTACTTCGATCTCTGGGGCCGTGGCACCCTGGTCACCGTCTCGAGTGGCGGTGGAGGGTCCGGCGGTGG
TGGATCAGATCCTCAATTGACCCAGTCCCCTAGTAGCCTTTCTGCAACCGTGGGCCAGAGGGTAACAATCAATTGCC
AGTCAAGCCAGTCCGTAGCGAAGAATAATAATTTGGCATGGTTCCAACAAAAACCGGGTAAACCTCCTAAACTCCTT
ATCTACTCAGCTTCAACCCTTGCCGCGGGTGTGCCCAGCCGGTTCTCAGGCTCAGGTTCCGGGACTCAATTTACACT
TACCATCACTCGCGTCCAAAGTGAGGATTTTGCAACCTACTATTGTTCTGCACGGGATTCCGGGAACATACAGTCCT
TTGGGGGTGGAACTCGGGTGGAGATAAAACGTACGGTGGCTGCCCCCTCTGTGTTCATCTTCCCACCCAGTGATGAG
CAGCTGAAGAGTGGCACAGCCTCTGTGGTGTGCCTGCTCAACAACTTCTACCCCAGAGAAGCCAAGGTGCAGTGGAA
GGTGGACAATGCCCTGCAGAGTGGCAACAGCCAGGAGAGTGTGACAGAGCAGGACAGCAAGGACAGCACCTACAGCC
TGTCCTCCACCCTGACCCTGTCCAAGGCTGACTATGAGAAGCACAAGGTGTATGCCTGTGAGGTGACCCACCAGGGC
CTGAGCAGCCCTGTGACCAAGAGCTTCAACCGAGGAGAGTGTGGAGGAGACAAGACCCACACCTGCCCTCCCTGCCC
AGCCCCAGAAGCTGCTGGAGGCCCCTCTGTGTTCCTCTTCCCTCCCAAGCCCAAGGACACCCTGATGATCTCCAGGA
CCCCAGAAGTCACCTGTGTGGTGGTGGATGTGTCCCATGAAGACCCAGAAGTGAAGTTCAACTGGTATGTGGATGGA
GTGGAAGTGCACAATGCCAAGACCAAGCCCAGAGAAGAGCAGTACAACAGCACCTACCGAGTGGTGTCTGTGCTGAC
TGTGCTGCACCAGGACTGGCTGAATGGGAAGGAGTACAAGTGTGCTGTGTCCAACAAGGCCCTGCCTGCCCCCATTG
AGAAGACCATCTCCAAGGCCAAGGGCCAGCCCAGAGAGCCCCAGGTCTACACCCTGCCTCCCTCCAGAGATGAGCTG
ACCAAGAACCAGGTGTCCCTGTGGTGCCTGGTGAAAGGCTTCTACCCCAGTGACATTGCTGTGGAGTGGGAGAGCAA
TGGCCAGCCAGAGAACAACTACAAGACCACCCCTCCTGTGCTGGACTCTGATGGCTCCTTCTTCCTGTACAGCAAGC
TGACTGTGGACAAGAGCCGCTGGCAGCAGGGCAATGTGTTCTCCTGCTCTGTCATGCATGAGGCCCTGCACAACCAC
TACACCCAGAAGAGCCTGAGCCTGAGCCCTGGA
>Sequence ID 13: SI-75X8 Chain A Amino Acid Sequence
QVQLQESGGRLVQPGEPLSLTCKTSGIDLSSNAIGWVRQAPGKGLEWIGVIFGSGNTYYASWAKGRETISRSTSTVY
LKMNSLRSEDTAIYYCARGGYSSDIWGQGTLVTVSSASTKGPSVFPLAPSSKSTSGGTAALGCLVKDYFPEPVTVSW
NSGALTSGVHTFPAVLQSSGLYSLSSVVTVPSSSLGTQTYICNVNHKPSNTKVDKRVEPKSCDKTHTCPPCPAPEAA
GGPSVFLFPPKPKDTLMISRTPEVTCVVVDVSHEDPEVKFNWYVDGVEVHNAKTKPREEQYNSTYRVVSVLTVLHQD
WLNGKEYKCAVSNKALPAPIEKTISKAKGQPREPQVYTLPPSRDELTKNQVSLSCAVKGFYPSDIAVEWESNGQPEN
NYKTTPPVLDSDGSFFLVSKLTVDKSRWQQGNVFSCSVMHEALHNHYTQKSLSLSPG
>Sequence ID 14: SI-75X8 Chain A Nucleotide Acid Sequence
CAAGTGCAGTTGCAAGAAAGTGGTGGTAGACTGGTTCAGCCTGGTGAACCCTTGTCACTGACGTGTAAAACAAGCGG
CATTGATCTGTCCTCTAACGCCATCGGATGGGTCCGACAGGCCCCAGGAAAAGGTCTGGAGTGGATCGGAGTTATCT
TCGGGAGCGGCAATACATACTACGCAAGCTGGGCAAAAGGGCGATTTACGATATCACGGAGCACCTCTACAGTTTAT
TTGAAAATGAACTCCCTCCGGTCCGAGGATACCGCGATATATTACTGTGCCAGAGGGGGGTACTCCTCTGATATCTG
GGGGCAGGGTACACTGGTTACAGTTTCATCCGCTAGCACCAAAGGCCCCTCTGTGTTCCCTCTGGCCCCCTCCTCCA
AGAGCACCTCTGGAGGCACTGCTGCCCTGGGCTGCCTGGTGAAGGACTACTTCCCAGAGCCTGTGACTGTGTCCTGG
AACTCTGGAGCCCTGACCTCTGGAGTGCACACCTTCCCTGCTGTGCTGCAGAGCTCTGGCCTCTACAGCCTGTCCTC
TGTGGTCACTGTGCCCTCCTCCAGCCTGGGCACCCAGACCTACATCTGCAATGTGAACCACAAGCCCTCCAACACCA
AGGTGGACAAGAGAGTGGAGCCCAAGTCCTGTGACAAGACCCACACCTGCCCTCCCTGCCCAGCCCCAGAGGCTGCT
GGAGGCCCCTCTGTGTTCCTCTTCCCTCCCAAGCCCAAGGACACCCTGATGATCTCCAGGACCCCAGAAGTCACCTG
TGTGGTGGTGGATGTGTCCCATGAAGACCCAGAAGTGAAGTTCAACTGGTATGTGGATGGAGTGGAGGTGCACAATG
CCAAGACCAAGCCCAGAGAAGAGCAGTACAACTCCACCTACCGAGTGGTGTCTGTGCTGACTGTGCTGCACCAGGAC
TGGCTGAATGGGAAGGAGTACAAGTGTGCTGTGTCCAACAAGGCCCTGCCTGCCCCCATTGAGAAGACCATCTCCAA
GGCCAAGGGCCAGCCCAGAGAGCCCCAGGTCTACACCCTGCCTCCCTCCAGAGATGAGCTGACCAAGAACCAGGTGT
CCCTGTCCTGTGCTGTGAAAGGCTTCTACCCCAGTGACATTGCTGTGGAGTGGGAGAGCAATGGCCAGCCAGAGAAC
AACTACAAGACCACCCCTCCTGTGCTGGACTCTGATGGCTCCTTCTTCCTGGTCTCCAAGCTGACTGTGGACAAGAG
CCGCTGGCAGCAGGGCAATGTGTTCTCCTGCTCTGTCATGCATGAGGCCCTGCACAACCACTACACCCAGAAGAGCC
TGAGCCTGAGCCCTGGA
>Sequence ID 15: SI-75X8 Chain B Amino Acid Sequence
QSALTQPASVSGSPGQSITISCTGTSSDVGGYNFVSWYQQHPGKAPKLMIYDVSDRPSGVSDRFSGSKSGNTASLII
SGLQADDEADYYCSSYGSSSTHVIFGGGTKVTVLGGGGSGGGGSGGGGSGGGGSQVQLQESGGGLVKPGGSLRLSCA
ASGFTFSSYWMSWVRQAPGKGLEWVANINRDGSASYYVDSVKGRFTISRDDAKNSLYLQMNSLRAEDTAVYYCARDR
GVGYFDLWGRGTLVTVSSGGGGSGGGGSDPQLTQSPSSLSATVGQRVTINCQSSQSVAKNNNLAWFQQKPGKPPKLL
IYSASTLAAGVPSRFSGSGSGTQFTLTITRVQSEDFATYYCSARDSGNIQSFGGGTRVEIKRTVAAPSVFIFPPSDE
QLKSGTASVVCLLNNFYPREAKVQWKVDNALQSGNSQESVTEQDSKDSTYSLSSTLTLSKADYEKHKVYACEVTHQG
LSSPVTKSFNRGECGGDKTHTCPPCPAPEAAGGPSVFLFPPKPKDTLMISRTPEVTCVVVDVSHEDPEVKFNWYVDG
VEVHNAKTKPREEQYNSTYRVVSVLTVLHQDWLNGKEYKCAVSNKALPAPIEKTISKAKGQPREPQVYTLPPSRDEL
TKNQVSLWCLVKGFYPSDIAVEWESNGQPENNYKTTPPVLDSDGSFFLYSKLTVDKSRWQQGNVFSCSVMHEALHNH
YTQKSLSLSPG
>Sequence ID 16: SI-75X8 Chain B Nucleotide Sequence
CAGTCTGCCCTGACTCAGCCTGCCTCCGTGTCTGGGTCTCCTGGACAGTCGATCACCATCTCCTGCACTGGAACCAG
CAGTGACGTTGGTGGTTATAACTTTGTCTCCTGGTACCAACAACACCCAGGCAAAGCCCCCAAACTCATGATCTATG
ATGTCAGTGATCGGCCCTCAGGGGTGTCTGATCGCTTCTCCGGCTCCAAGTCTGGCAACACGGCCTCCCTGATCATC
TCTGGCCTCCAGGCTGACGACGAGGCTGATTATTACTGCAGCTCATATGGGAGCAGCAGCACTCATGTGATTTTCGG
CGGAGGGACCAAGGTGACCGTCCTAGGCGGTGGCGGTAGTGGGGGAGGCGGTTCTGGCGGCGGAGGGTCCGGCGGTG
GAGGATCACAGGTGCAATTGCAGGAGTCGGGGGGAGGCCTGGTCAAGCCTGGAGGGTCCCTGAGACTCTCCTGTGCA
GCCTCTGGATTCACCTTTAGTAGTTATTGGATGAGCTGGGTCCGCCAGGCTCCAGGGAAGGGGCTGGAGTGGGTGGC
CAACATAAACCGCGATGGAAGTGCGAGTTACTATGTGGACTCTGTGAAGGGCCGATTCACCATCTCCAGAGACGACG
CCAAGAACTCACTGTATCTGCAAATGAACAGCCTGAGAGCTGAGGACACGGCTGTGTATTACTGTGCGAGAGATCGT
GGGGTGGGCTACTTCGATCTCTGGGGCCGTGGCACCCTGGTCACCGTCTCGAGTGGCGGTGGAGGGTCCGGCGGTGG
TGGATCAGATCCTCAATTGACCCAGTCCCCTAGTAGCCTTTCTGCAACCGTGGGCCAGAGGGTAACAATCAATTGCC
AGTCAAGCCAGTCCGTAGCGAAGAATAATAATTTGGCATGGTTCCAACAAAAACCGGGTAAACCTCCTAAACTCCTT
ATCTACTCAGCTTCAACCCTTGCCGCGGGTGTGCCCAGCCGGTTCTCAGGCTCAGGTTCCGGGACTCAATTTACACT
TACCATCACTCGCGTCCAAAGTGAGGATTTTGCAACCTACTATTGTTCTGCACGGGATTCCGGGAACATACAGTCCT
TTGGGGGTGGAACTCGGGTGGAGATAAAACGTACGGTGGCTGCCCCCTCTGTGTTCATCTTCCCACCCAGTGATGAG
CAGCTGAAGAGTGGCACAGCCTCTGTGGTGTGCCTGCTCAACAACTTCTACCCCAGAGAAGCCAAGGTGCAGTGGAA
GGTGGACAATGCCCTGCAGAGTGGCAACAGCCAGGAGAGTGTGACAGAGCAGGACAGCAAGGACAGCACCTACAGCC
TGTCCTCCACCCTGACCCTGTCCAAGGCTGACTATGAGAAGCACAAGGTGTATGCCTGTGAGGTGACCCACCAGGGC
CTGAGCAGCCCTGTGACCAAGAGCTTCAACCGAGGAGAGTGTGGAGGAGACAAGACCCACACCTGCCCTCCCTGCCC
AGCCCCAGAAGCTGCTGGAGGCCCCTCTGTGTTCCTCTTCCCTCCCAAGCCCAAGGACACCCTGATGATCTCCAGGA
CCCCAGAAGTCACCTGTGTGGTGGTGGATGTGTCCCATGAAGACCCAGAAGTGAAGTTCAACTGGTATGTGGATGGA
GTGGAAGTGCACAATGCCAAGACCAAGCCCAGAGAAGAGCAGTACAACAGCACCTACCGAGTGGTGTCTGTGCTGAC
TGTGCTGCACCAGGACTGGCTGAATGGGAAGGAGTACAAGTGTGCTGTGTCCAACAAGGCCCTGCCTGCCCCCATTG
AGAAGACCATCTCCAAGGCCAAGGGCCAGCCCAGAGAGCCCCAGGTCTACACCCTGCCTCCCTCCAGAGATGAGCTG
ACCAAGAACCAGGTGTCCCTGTGGTGCCTGGTGAAAGGCTTCTACCCCAGTGACATTGCTGTGGAGTGGGAGAGCAA
TGGCCAGCCAGAGAACAACTACAAGACCACCCCTCCTGTGCTGGACTCTGATGGCTCCTTCTTCCTGTACAGCAAGC
TGACTGTGGACAAGAGCCGCTGGCAGCAGGGCAATGTGTTCTCCTGCTCTGTCATGCATGAGGCCCTGCACAACCAC
TACACCCAGAAGAGCCTGAGCCTGAGCCCTGGA
>Sequence ID 17: SI-75P6 Chain A Amino Acid Sequence
DVVMTQSPSTLSASVGDRVTINCQASESISSWLAWYQQKPGKAPKLLIYEASKLASGVPSRFSGSGSGTEFTLTISS
LQPDDFATYYCQGYFYFISRTYVNSFGGGTKVEIKGGGGSGGGGSGGGGSGGGGSEVQLVESGGGLVQPGGSLRLSC
AASGFTISTNAMSWVRQAPGKGLEWIGVITGRDITYYASWAKGRFTISRDNSKNTLYLQMNSLRAEDTAVYYCARDG
GSSAITSNNIWGQGTLVTVSSGGGGSGGGGSQVQLQQSGPGLVKPSETLSITCTVSGFSLTNYGVHWIRQAPGKGLE
WLGVIWSGGNTDYNTPFTSRFTITKDNSKNQVYFKLRSVRADDTAIYYCARALTYYDYEFAYWGQGTLVTVSSASTK
GPSVFPLAPSSKSTSGGTAALGCLVKDYFPEPVTVSWNSGALTSGVHTFPAVLQSSGLYSLSSVVTVPSSSLGTQTY
ICNVNHKPSNTKVDKRVEPKSCDKTHTCPPCPAPEAAGGPSVFLFPPKPKDTLMISRTPEVTCVVVDVSHEDPEVKF
NWYVDGVEVHNAKTKPREEQYNSTYRVVSVLTVLHQDWLNGKEYKCAVSNKALPAPIEKTISKAKGQPREPQVYTLP
PSRDELTKNQVSLSCAVKGFYPSDIAVEWESNGQPENNYKTTPPVLDSDGSFFLVSKLTVDKSRWQQGNVFSCSVMH
EALHNHYTQKSLSLSPGGGGGSGGGGSDVVMTQSPSSVSASVGDRVTITCQASQNIRTYLSWYQQKPGKAPKLLIYA
AANLASGVPSRFSGSGSGTDFTLTISDLEPGDAATYYCQSTYLGTDYVGGAFGGGTKLTVLGGGGSGGGGSGGGGSG
GGGSEVQLVESGGGLVQPGGSLRLSCTASGFTISSYHMQWVRQAPGKGLEYIGTISSGGNVYYASSARGRFTISRPS
SKNTVDLQMNSLRAEDTAVYYCARDSGYSDPMWGQGTLVTVSS
>Sequence ID 18: SI-75P6 Chain A Nucleotide Sequence
GACGTCGTGATGACCCAGTCTCCTTCCACCCTGTCTGCATCTGTAGGAGACAGAGTCACCATCAATTGCCAAGCCAG
TGAGAGCATTAGCAGTTGGTTAGCCTGGTATCAGCAGAAACCAGGGAAAGCCCCTAAGCTCCTGATCTATGAAGCAT
CCAAACTGGCATCTGGGGTCCCATCAAGGTTCAGCGGCAGTGGATCTGGGACAGAATTTACTCTCACCATCAGCAGC
CTGCAGCCTGATGATTTTGCAACTTATTACTGCCAAGGCTATTTTTATTTTATTAGTCGTACTTATGTAAATTCTTT
CGGCGGAGGGACCAAGGTGGAGATCAAAGGCGGTGGCGGTAGTGGGGGAGGCGGTTCTGGCGGCGGAGGGTCCGGCG
GTGGAGGATCAGAGGTGCAGCTGGTGGAGTCTGGGGGAGGCTTGGTCCAGCCTGGGGGGTCCCTGAGACTCTCCTGT
GCAGCCTCTGGATTCACCATCAGTACCAATGCAATGAGCTGGGTCCGCCAGGCTCCAGGGAAGGGGCTGGAGTGGAT
CGGAGTCATTACTGGTCGTGATATCACATACTACGCGAGCTGGGCGAAAGGCAGATTCACCATCTCCAGAGACAATT
CCAAGAACACGCTGTATCTTCAAATGAACAGCCTGAGAGCCGAGGACACGGCTGTGTATTACTGTGCGAGAGACGGT
GGTTCTTCTGCTATTACTAGTAACAACATTTGGGGCCAGGGAACCCTGGTCACCGTCTCGAGTGGCGGTGGAGGGTC
CGGCGGTGGTGGATCACAAGTACAGTTGCAGCAATCCGGTCCCGGTCTCGTCAAACCGAGTGAGACGCTTAGTATAA
CGTGTACTGTTTCAGGCTTTAGCCTTACGAACTATGGAGTTCACTGGATTCGGCAGGCACCCGGCAAAGGTTTGGAA
TGGCTGGGTGTTATTTGGTCAGGTGGAAATACAGACTATAACACCCCCTTTACAAGTCGGTTCACAATTACGAAAGA
TAATTCCAAAAATCAAGTTTATTTCAAGTTGAGATCCGTCCGCGCGGACGACACTGCGATCTACTATTGTGCGAGGG
CACTGACCTACTACGATTACGAATTTGCGTATTGGGGGCAAGGGACTCTTGTAACAGTCTCCAGTGCTAGCACCAAG
GGCCCATCGGTCTTCCCCCTGGCACCCTCCTCCAAGAGCACCTCTGGGGGCACAGCGGCCCTGGGCTGCCTGGTCAA
GGACTACTTCCCCGAACCGGTGACGGTGTCGTGGAACTCAGGCGCCCTGACCAGCGGCGTGCACACCTTCCCGGCTG
TCCTACAGTCCTCAGGACTCTACTCCCTCAGCAGCGTGGTGACCGTGCCCTCCAGCAGCTTGGGCACCCAGACCTAC
ATCTGCAACGTGAATCACAAGCCCAGCAACACCAAGGTGGACAAGAGAGTTGAGCCCAAATCTTGTGACAAAACTCA
CACATGCCCACCGTGCCCAGCACCTGAAGCCGCGGGGGGACCGTCAGTCTTCCTCTTCCCCCCAAAACCCAAGGACA
CCCTCATGATCTCCCGGACCCCTGAGGTCACATGCGTGGTGGTGGACGTGAGCCACGAAGACCCTGAGGTCAAGTTC
AACTGGTACGTGGACGGCGTGGAGGTGCATAATGCCAAGACAAAGCCGCGGGAGGAGCAGTACAACAGCACGTACCG
TGTGGTCAGCGTCCTCACCGTCCTGCACCAGGACTGGCTGAATGGCAAGGAGTACAAGTGCGCGGTCTCCAACAAAG
CCCTCCCAGCCCCCATCGAGAAAACCATCTCCAAAGCCAAAGGGCAGCCCCGAGAACCACAGGTGTATACCCTGCCC
CCATCCCGGGATGAGCTGACCAAGAACCAGGTCAGCCTGTCCTGCGCCGTCAAAGGCTTCTATCCCAGCGACATCGC
CGTGGAGTGGGAGAGCAATGGGCAGCCGGAGAACAACTACAAGACCACGCCTCCCGTGCTGGACTCCGACGGCTCCT
TCTTCCTCGTGAGCAAGCTCACCGTGGACAAGAGCAGGTGGCAGCAGGGGAACGTCTTCTCATGCTCCGTGATGCAT
GAGGCTCTGCACAACCACTACACGCAGAAGAGCCTCTCCCTGTCTCCGGGTGGCGGCGGCGGTTCAGGTGGTGGGGG
ATCCGACGTTGTGATGACGCAGTCTCCTAGTTCAGTATCAGCGTCTGTTGGGGATCGAGTCACGATTACATGCCAGG
CGAGCCAAAATATTAGGACGTATCTGTCTTGGTATCAACAAAAGCCTGGTAAGGCTCCAAAACTCCTCATTTACGCC
GCTGCCAACTTGGCTAGTGGAGTACCTTCACGCTTTAGTGGGTCAGGTTCTGGAACAGATTTTACGTTGACGATCTC
CGATTTGGAACCAGGGGACGCTGCCACGTATTATTGCCAGTCCACCTACCTCGGGACTGACTACGTTGGTGGGGCGT
TTGGCGGAGGAACAAAACTCACTGTACTTGGTGGTGGTGGTTCAGGCGGGGGGGGTTCCGGCGGAGGCGGTTCTGGG
GGTGGAGGTTCCGAGGTTCAGTTGGTTGAAAGTGGGGGGGGACTCGTTCAGCCTGGAGGCTCTTTGCGACTTTCTTG
TACCGCTTCTGGGTTCACTATAAGTTCATATCATATGCAATGGGTAAGACAGGCGCCTGGTAAGGGACTTGAATACA
TAGGAACAATAAGCTCTGGTGGTAACGTCTATTACGCCTCATCCGCGCGGGGGAGGTTTACAATTTCCAGGCCTTCT
AGCAAAAACACGGTAGATCTGCAAATGAACTCTCTTCGCGCTGAAGATACAGCAGTCTACTACTGCGCCAGGGATTC
AGGGTATTCTGACCCCATGTGGGGGCAGGGCACATTGGTTACCGTGTCCTCT
>Sequence ID 19: SI-75P6 Chain B Amino Acid Sequence
QSALTQPASVSGSPGQSITISCTGTSSDVGGYNFVSWYQQHPGKAPKLMIYDVSDRPSGVSDRFSGSKSGNTASLII
SGLQADDEADYYCSSYGSSSTHVIFGGGTKVTVLGGGGSGGGGSGGGGSGGGGSQVQLQESGGGLVKPGGSLSLSCA
ASGFTFSSYWMSWVRQAPGKGLEWVANINRDGSASYYVDSVKGRFTISRDDAKNSLYLQMNSLRAEDTAVYYCARDR
GVGYFDLWGRGTLVTVSSGGGGSGGGGSEIVLTQSPSTLSVSPGERATFSCRASQSIGTNIHWYQQKPGKPPRLLIK
YASESISGIPDRFSGSGSGTEFTLTISSVQSEDFAVYYCQQNNNWPTTFGPGTKLTVLRTVAAPSVFIFPPSDEQLK
SGTASVVCLLNNFYPREAKVQWKVDNALQSGNSQESVTEQDSKDSTYSLSSTLTLSKADYEKHKVYACEVTHQGLSS
PVTKSFNRGECGGDKTHTCPPCPAPEAAGGPSVFLFPPKPKDTLMISRTPEVTCVVVDVSHEDPEVKFNWYVDGVEV
HNAKTKPREEQYNSTYRVVSVLTVLHQDWLNGKEYKCAVSNKALPAPIEKTISKAKGQPREPQVYTLPPSRDELTKN
QVSLWCLVKGFYPSDIAVEWESNGQPENNYKTTPPVLDSDGSFFLYSKLTVDKSRWQQGNVFSCSVMHEALHNRFTQ
KSLSLSPGGGGGSGGGGSDIQMTQSPSTLSASVGDRVTITCQASQSISSHLNWYQQKPGKAPKLLIYKASTLASGVP
SRFSGSGSGTEFTLTISSLQPDDFATYYCQQGYSWGNVDNVFGGGTKVTVLGGGGSGGGGSGGGGSGGGGSEVQLLE
SGGGLVQPGGSLSLSCAASGFSFSSGYDMCWVRQAPGKGLEWIACIAAGSAGITYDANWAKGRFTISRDNSKNTLYL
QMNSLRAEDTAVYYCARSAFSFDYAMDLWGQGTLVTVSS
>Sequence ID 20: SI-75P6 Chain B Nucleotide Sequence
CAGTCTGCCCTGACTCAGCCTGCCTCCGTGTCTGGGTCTCCTGGACAGTCGATCACCATCTCCTGCACTGGAACCAG
CAGTGACGTTGGTGGTTATAACTTTGTCTCCTGGTACCAACAACACCCAGGCAAAGCCCCCAAACTCATGATCTATG
ATGTCAGTGATCGGCCCTCAGGGGTGTCTGATCGCTTCTCCGGCTCCAAGTCTGGCAACACGGCCTCCCTGATCATC
TCTGGCCTCCAGGCTGACGACGAGGCTGATTATTACTGCAGCTCATATGGGAGCAGCAGCACTCATGTGATTTTCGG
CGGAGGGACCAAGGTGACCGTCCTAGGCGGTGGCGGTAGTGGGGGAGGCGGTTCTGGCGGCGGAGGGTCCGGCGGTG
GAGGATCACAGGTGCAATTGCAGGAGTCGGGGGGAGGCCTGGTCAAGCCTGGAGGGTCCCTGAGCCTCTCCTGTGCA
GCCTCTGGATTCACCTTTAGTAGTTATTGGATGAGCTGGGTCCGCCAGGCTCCAGGGAAGGGGCTGGAGTGGGTGGC
CAACATAAACCGCGATGGAAGTGCGAGTTACTATGTGGACTCTGTGAAGGGCCGATTCACCATCTCCAGAGACGACG
CCAAGAACTCACTGTATCTGCAAATGAACAGCCTGAGAGCTGAGGACACGGCTGTGTATTACTGTGCGAGAGATCGT
GGGGTGGGCTACTTCGATCTCTGGGGCCGTGGCACCCTGGTCACCGTCTCGAGTGGCGGTGGAGGGTCCGGCGGTGG
TGGATCAGAAATCGTCCTTACACAATCTCCTAGCACACTGAGTGTGAGCCCCGGCGAACGCGCGACTTTCTCTTGCA
GGGCAAGTCAATCCATAGGGACTAATATACATTGGTATCAACAAAAGCCAGGTAAACCACCCAGGCTTTTGATTAAG
TATGCAAGTGAGTCTATTTCCGGTATCCCTGACCGCTTCTCTGGATCAGGCAGTGGCACAGAGTTCACACTCACCAT
ATCTAGTGTGCAATCAGAGGACTTCGCCGTGTATTACTGCCAACAGAATAATAACTGGCCGACTACCTTCGGACCCG
GTACAAAGCTGACCGTTTTACGTACGGTGGCTGCACCATCTGTCTTCATCTTCCCGCCATCTGATGAGCAGTTGAAA
TCTGGAACTGCCTCTGTTGTGTGCCTGCTGAATAACTTCTATCCCAGAGAGGCCAAAGTACAGTGGAAGGTGGATAA
CGCCCTCCAATCGGGTAACTCCCAGGAGAGTGTCACAGAGCAGGACAGCAAGGACAGCACCTACAGCCTCAGCAGCA
CCCTGACGCTGAGCAAAGCAGACTACGAGAAACACAAAGTCTACGCCTGCGAAGTCACCCATCAGGGCCTGAGCTCG
CCCGTCACAAAGAGCTTCAACAGGGGAGAGTGTGGAGGCGACAAAACTCACACATGCCCACCGTGCCCAGCACCTGA
AGCCGCGGGGGGACCGTCAGTCTTCCTCTTCCCCCCAAAACCCAAGGACACCCTCATGATCTCCCGGACCCCTGAGG
TCACATGCGTGGTGGTGGACGTGAGCCACGAAGACCCTGAGGTCAAGTTCAACTGGTACGTGGACGGCGTGGAGGTG
CATAATGCCAAGACAAAGCCGCGGGAGGAGCAGTACAACAGCACGTACCGTGTGGTCAGCGTCCTCACCGTCCTGCA
CCAGGACTGGCTGAATGGCAAGGAGTACAAGTGCGCGGTCTCCAACAAAGCCCTCCCAGCCCCCATCGAGAAAACCA
TCTCCAAAGCCAAAGGGCAGCCCCGAGAACCACAGGTGTACACCCTGCCCCCAAGCCGGGATGAGCTGACCAAGAAC
CAGGTCAGCCTGTGGTGCCTGGTCAAAGGCTTCTATCCCAGCGACATCGCCGTGGAGTGGGAGAGCAATGGGCAGCC
GGAGAACAACTACAAGACCACGCCTCCCGTGCTGGACTCCGACGGCTCCTTCTTCCTCTATAGCAAGCTCACCGTGG
ACAAGAGCAGGTGGCAGCAGGGGAACGTCTTCTCATGCTCCGTGATGCATGAGGCTCTGCACAACAGATTCACGCAG
AAGAGCCTCTCCCTGTCTCCGGGTGGCGGTGGAGGGTCCGGCGGTGGTGGATCCGACATTCAGATGACACAGTCACC
GTCTACGCTCTCAGCCTCAGTAGGCGATAGGGTGACTATCACCTGCCAAGCCTCCCAATCTATAAGTTCACACCTCA
ACTGGTATCAACAGAAACCCGGTAAAGCACCGAAGCTGCTCATCTACAAGGCATCAACTCTTGCCTCAGGTGTGCCT
AGTCGCTTCTCCGGGAGCGGCTCCGGTACTGAGTTTACTTTGACGATATCTTCCCTCCAACCCGACGACTTCGCCAC
ATACTATTGTCAGCAGGGTTATAGTTGGGGAAATGTTGACAATGTGTTTGGAGGGGGAACGAAAGTGACTGTGTTGG
GAGGGGGAGGAAGTGGCGGCGGCGGAAGCGGAGGTGGTGGCTCCGGCGGGGGTGGAAGCGAAGTGCAATTGCTCGAA
AGTGGTGGCGGACTTGTGCAACCTGGTGGAAGCCTCTCACTCTCTTGCGCGGCGAGTGGTTTTAGCTTCAGTAGCGG
CTACGATATGTGCTGGGTAAGACAGGCTCCTGGTAAAGGCCTTGAGTGGATTGCGTGTATCGCCGCCGGGTCTGCTG
GTATAACATACGATGCAAACTGGGCGAAAGGGCGCTTCACAATCTCCAGGGACAACTCAAAAAATACATTGTACCTC
CAGATGAATAGCCTGAGAGCCGAAGACACCGCAGTCTACTATTGCGCAAGGTCAGCATTTAGCTTCGATTATGCAAT
GGATCTTTGGGGCCAGGGGACGCTCGTCACCGTCTCATCTTGA
>Sequence ID 21: SI-75P4 Chain A Amino Acid Sequence
EIVLTQSPSTLSVSPGERATFSCRASQSIGTNIHWYQQKPGKPPRLLIKYASESISGIPDRFSGSGSGTEFTLTISS
VQSEDFAVYYCQQNNNWPTTFGPGTKLTVLGGGGSGGGGSGGGGSGGGGSQVQLQQSGPGLVKPSETLSITCTVSGF
SLTNYGVHWIRQAPGKGLEWLGVIWSGGNTDYNTPFTSRFTITKDNSKNQVYFKLRSVRADDTAIYYCARALTYYDY
EFAYWGQGTLVTVSSGGGGSGGGGSEVQLVESGGGLVQPGGSLRLSCAASGFTISTNAMSWVRQAPGKGLEWIGVIT
GRDITYYASWAKGRFTISRDNSKNTLYLQMNSLRAEDTAVYYCARDGGSSAITSNNIWGQGTLVTVSSASTKGPSVF
PLAPSSKSTSGGTAALGCLVKDYFPEPVTVSWNSGALTSGVHTFPAVLQSSGLYSLSSVVTVPSSSLGTQTYICNVN
HKPSNTKVDKRVEPKSCDKTHTCPPCPAPEAAGGPSVFLFPPKPKDTLMISRTPEVTCVVVDVSHEDPEVKFNWYVD
GVEVHNAKTKPREEQYNSTYRVVSVLTVLHQDWLNGKEYKCAVSNKALPAPIEKTISKAKGQPREPQVYTLPPSRDE
LTKNQVSLSCAVKGFYPSDIAVEWESNGQPENNYKTTPPVLDSDGSFFLVSKLTVDKSRWQQGNVFSCSVMHEALHN
HYTQKSLSLSPGGGGGSGGGGSREGPELSPDDPAGLLDLRQGMFAQLVAQNVLLIDGPLSWYSDPGLAGVSLTGGLS
YKEDTKELVVAKAGVYYVFFQLELRRVVAGEGSGSVSLALHLQPLRSAAGAAALALTVDLPPASSEARNSAFGFQGR
LLHLSAGQRLGVHLHTEARARHAWQLTQGATVLGLFRVTPEIPAGLGSTGSGSKPGSGEGSTKGREGPELSPDDPAG
LLDLRQGMFAQLVAQNVLLIDGPLSWYSDPGLAGVSLTGGLSYKEDTKELVVAKAGVYYVFFQLELRRVVAGEGSGS
VSLALHLQPLRSAAGAAALALTVDLPPASSEARNSAFGFQGRLLHLSAGQRLGVHLHTEARARHAWQLTQGATVLGL
FRVTPEIPAGLGGGGSGGGGSREGPELSPDDPAGLLDLRQGMFAQLVAQNVLLIDGPLSWYSDPGLAGVSLTGGLSY
KEDTKELVVAKAGVYYVFFQLELRRVVAGEGSGSVSLALHLQPLRSAAGAAALALTVDLPPASSEARNSAFGFQGRL
LHLSAGQRLGVHLHTEARARHAWQLTQGATVLGLFRVTPEIPAGL
>Sequence ID 22: SI-75P4 Chain A Nucleotide Sequence
GAAATCGTCCTTACACAATCTCCTAGCACACTGAGTGTGAGCCCCGGCGAACGCGCGACTTTCTCTTGCAGGGCAAG
TCAATCCATAGGGACTAATATACATTGGTATCAACAAAAGCCAGGTAAACCACCCAGGCTTTTGATTAAGTATGCAA
GTGAGTCTATTTCCGGTATCCCTGACCGCTTCTCTGGATCAGGCAGTGGCACAGAGTTCACACTCACCATATCTAGT
GTGCAATCAGAGGACTTCGCCGTGTATTACTGCCAACAGAATAATAACTGGCCGACTACCTTCGGACCCGGTACAAA
GCTGACCGTTTTAGGCGGTGGCGGTAGTGGGGGAGGCGGTTCTGGCGGCGGAGGGTCCGGCGGTGGAGGATCACAAG
TACAGTTGCAGCAATCCGGTCCCGGTCTCGTCAAACCGAGTGAGACGCTTAGTATAACGTGTACTGTTTCAGGCTTT
AGCCTTACGAACTATGGAGTTCACTGGATTCGGCAGGCACCCGGCAAAGGTTTGGAATGGCTGGGTGTTATTTGGTC
AGGTGGAAATACAGACTATAACACCCCCTTTACAAGTCGGTTCACAATTACGAAAGATAATTCCAAAAATCAAGTTT
ATTTCAAGTTGAGATCCGTCCGCGCGGACGACACTGCGATCTACTATTGTGCGAGGGCACTGACCTACTACGATTAC
GAATTTGCGTATTGGGGGCAAGGGACTCTTGTAACAGTCTCGAGCGGCGGTGGAGGGTCCGGCGGTGGTGGATCAGA
GGTGCAGCTGGTGGAGTCTGGGGGAGGCTTGGTCCAGCCTGGGGGGTCCCTGAGACTCTCCTGTGCAGCCTCTGGAT
TCACCATCAGTACCAATGCAATGAGCTGGGTCCGCCAGGCTCCAGGGAAGGGGCTGGAGTGGATCGGAGTCATTACT
GGTCGTGATATCACATACTACGCGAGCTGGGCGAAAGGCAGATTCACCATCTCCAGAGACAATTCCAAGAACACGCT
GTATCTTCAAATGAACAGCCTGAGAGCCGAGGACACGGCTGTGTATTACTGTGCGAGAGACGGTGGTTCTTCTGCTA
TTACTAGTAACAACATTTGGGGCCAGGGAACCCTGGTCACCGTGTCCTCAGCTAGCACCAAGGGCCCATCGGTCTTC
CCCCTGGCACCCTCCTCCAAGAGCACCTCTGGGGGCACAGCGGCCCTGGGCTGCCTGGTCAAGGACTACTTCCCCGA
ACCGGTGACGGTGTCGTGGAACTCAGGCGCCCTGACCAGCGGCGTGCACACCTTCCCGGCTGTCCTACAGTCCTCAG
GACTCTACTCCCTCAGCAGCGTGGTGACCGTGCCCTCCAGCAGCTTGGGCACCCAGACCTACATCTGCAACGTGAAT
CACAAGCCCAGCAACACCAAGGTGGACAAGAGAGTTGAGCCCAAATCTTGTGACAAAACTCACACATGCCCACCGTG
CCCAGCACCTGAAGCCGCGGGGGGACCGTCAGTCTTCCTCTTCCCCCCAAAACCCAAGGACACCCTCATGATCTCCC
GGACCCCTGAGGTCACATGCGTGGTGGTGGACGTGAGCCACGAAGACCCTGAGGTCAAGTTCAACTGGTACGTGGAC
GGCGTGGAGGTGCATAATGCCAAGACAAAGCCGCGGGAGGAGCAGTACAACAGCACGTACCGTGTGGTCAGCGTCCT
CACCGTCCTGCACCAGGACTGGCTGAATGGCAAGGAGTACAAGTGCGCGGTCTCCAACAAAGCCCTCCCAGCCCCCA
TCGAGAAAACCATCTCCAAAGCCAAAGGGCAGCCCCGAGAACCACAGGTGTATACCCTGCCCCCATCCCGGGATGAG
CTGACCAAGAACCAGGTCAGCCTGTCCTGCGCCGTCAAAGGCTTCTATCCCAGCGACATCGCCGTGGAGTGGGAGAG
CAATGGGCAGCCGGAGAACAACTACAAGACCACGCCTCCCGTGCTGGACTCCGACGGCTCCTTCTTCCTCGTGAGCA
AGCTCACCGTGGACAAGAGCAGGTGGCAGCAGGGGAACGTCTTCTCATGCTCCGTGATGCATGAGGCTCTGCACAAC
CACTACACGCAGAAGAGCCTCTCCCTGTCTCCGGGTGGCGGCGGCGGTTCAGGTGGTGGGGGATCCCGAGAGGGCCC
CGAGCTGTCTCCTGATGACCCAGCAGGCCTCTTGGACTTGCGGCAGGGTATGTTCGCTCAACTTGTGGCTCAGAATG
TTCTGCTCATTGATGGACCACTCTCTTGGTATAGTGACCCCGGTCTGGCCGGGGTGAGTCTGACCGGCGGGCTCTCT
TATAAAGAGGATACTAAGGAACTGGTCGTAGCAAAAGCGGGCGTTTATTACGTTTTTTTTCAGCTGGAGCTCAGGCG
CGTGGTGGCCGGCGAGGGCAGTGGCTCTGTGTCCCTGGCCCTGCACTTACAGCCCTTGAGAAGCGCTGCAGGTGCTG
CCGCACTGGCTTTAACTGTTGACCTCCCTCCGGCCTCTTCTGAAGCTAGAAACAGCGCTTTCGGCTTCCAAGGGCGC
CTGCTGCACCTGAGCGCAGGCCAGCGCTTAGGTGTGCACCTTCATACAGAGGCCAGGGCCCGACACGCTTGGCAGCT
CACACAGGGTGCCACGGTTCTCGGACTTTTCCGCGTTACTCCCGAGATCCCCGCTGGCCTCGGAAGTACTGGTTCTG
GGTCTAAACCCGGTTCCGGCGAAGGTAGTACTAAAGGACGAGAAGGGCCAGAGTTAAGTCCAGATGACCCTGCTGGG
CTTTTGGACCTGCGGCAGGGCATGTTCGCTCAACTGGTGGCTCAGAACGTGCTGCTGATCGATGGCCCCCTGAGTTG
GTACAGCGATCCCGGGCTGGCAGGCGTGTCACTTACAGGGGGCCTCTCTTACAAGGAAGACACCAAGGAGTTAGTGG
TCGCTAAGGCTGGCGTGTATTACGTGTTCTTCCAACTGGAGCTGAGAAGGGTTGTGGCAGGAGAGGGTAGCGGCAGC
GTGTCTTTAGCCCTTCACTTGCAGCCCCTGAGGTCTGCTGCAGGTGCAGCCGCTCTCGCGCTCACCGTGGATCTCCC
CCCAGCCTCATCTGAAGCTAGGAACAGTGCATTTGGCTTTCAGGGACGCTTGCTGCACCTCTCCGCTGGACAGAGGC
TGGGCGTGCACCTTCACACAGAGGCCCGTGCCAGGCATGCATGGCAGCTCACTCAGGGGGCAACAGTGCTGGGTCTC
TTCCGCGTGACTCCTGAAATACCAGCTGGACTTGGCGGTGGAGGCAGCGGCGGAGGAGGATCTCGTGAGGGGCCAGA
ACTGTCCCCCGATGACCCAGCCGGACTGCTCGATCTCAGACAGGGCATGTTCGCTCAGCTTGTAGCCCAAAATGTCC
TCCTGATTGACGGCCCTTTGAGCTGGTATAGTGATCCCGGCTTGGCCGGGGTATCTCTGACCGGAGGCCTCTCCTAC
AAGGAAGACACCAAAGAGCTGGTGGTGGCAAAAGCGGGGGTGTATTATGTGTTCTTTCAGCTCGAGCTGCGGAGAGT
TGTGGCCGGGGAAGGGTCTGGGAGCGTATCTCTTGCACTTCACCTGCAGCCCCTGCGCAGCGCCGCTGGAGCCGCCG
CCCTTGCTCTTACTGTGGATCTGCCTCCTGCTTCCTCAGAAGCACGCAACAGCGCCTTCGGCTTTCAAGGACGTCTC
CTGCACTTGTCCGCAGGACAGAGGTTGGGCGTCCATTTACACACTGAGGCACGGGCACGGCACGCTTGGCAGCTTAC
CCAGGGAGCCACCGTGCTGGGACTCTTTAGAGTGACACCCGAGATCCCCGCTGGCTTGTGA
>Sequence ID 23: SI-75P4 Chain B Amino Acid Sequence
QSALTQPASVSGSPGQSITISCTGTSSDVGGYNFVSWYQQHPGKAPKLMIYDVSDRPSGVSDRFSGSKSGNTASLII
SGLQADDEADYYCSSYGSSSTHVIFGGGTKVTVLGGGGSGGGGSGGGGSGGGGSQVQLQESGGGLVKPGGSLSLSCA
ASGFTFSSYWMSWVRQAPGKGLEWVANINRDGSASYYVDSVKGRFTISRDDAKNSLYLQMNSLRAEDTAVYYCARDR
GVGYFDLWGRGTLVTVSSGGGGSGGGGSDVVMTQSPSTLSASVGDRVTINCQASESISSWLAWYQQKPGKAPKLLIY
EASKLASGVPSRFSGSGSGTEFTLTISSLQPDDFATYYCQGYFYFISRTYVNSFGGGTKVEIKRTVAAPSVFIFPPS
DEQLKSGTASVVCLLNNFYPREAKVQWKVDNALQSGNSQESVTEQDSKDSTYSLSSTLTLSKADYEKHKVYACEVTH
QGLSSPVTKSFNRGECGGDKTHTCPPCPAPEAAGGPSVFLFPPKPKDTLMISRTPEVTCVVVDVSHEDPEVKFNWYV
DGVEVHNAKTKPREEQYNSTYRVVSVLTVLHQDWLNGKEYKCAVSNKALPAPIEKTISKAKGQPREPQVYTLPPSRD
ELTKNQVSLWCLVKGFYPSDIAVEWESNGQPENNYKTTPPVLDSDGSFFLYSKLTVDKSRWQQGNVFSCSVMHEALH
NRFTQKSLSLSPGGGGGSGGGGSDIQMTQSPSTLSASVGDRVTITCQASQSISSHLNWYQQKPGKAPKLLIYKASTL
ASGVPSRFSGSGSGTEFTLTISSLQPDDFATYYCQQGYSWGNVDNVFGGGTKVTVLGGGGSGGGGSGGGGSGGGGSE
VQLLESGGGLVQPGGSLSLSCAASGFSFSSGYDMCWVRQAPGKGLEWIACIAAGSAGITYDANWAKGRFTISRDNSK
NTLYLQMNSLRAEDTAVYYCARSAFSFDYAMDLWGQGTLVTVSS
>Sequence ID 24: SI-75P4 Chain B Nucleotide Sequence
CAGTCTGCCCTGACTCAGCCTGCCTCCGTGTCTGGGTCTCCTGGACAGTCGATCACCATCTCCTGCACTGGAACCAG
CAGTGACGTTGGTGGTTATAACTTTGTCTCCTGGTACCAACAACACCCAGGCAAAGCCCCCAAACTCATGATCTATG
ATGTCAGTGATCGGCCCTCAGGGGTGTCTGATCGCTTCTCCGGCTCCAAGTCTGGCAACACGGCCTCCCTGATCATC
TCTGGCCTCCAGGCTGACGACGAGGCTGATTATTACTGCAGCTCATATGGGAGCAGCAGCACTCATGTGATTTTCGG
CGGAGGGACCAAGGTGACCGTCCTAGGCGGTGGCGGTAGTGGGGGAGGCGGTTCTGGCGGCGGAGGGTCCGGCGGTG
GAGGATCACAGGTGCAATTGCAGGAGTCGGGGGGAGGCCTGGTCAAGCCTGGAGGGTCCCTGAGCCTCTCCTGTGCA
GCCTCTGGATTCACCTTTAGTAGTTATTGGATGAGCTGGGTCCGCCAGGCTCCAGGGAAGGGGCTGGAGTGGGTGGC
CAACATAAACCGCGATGGAAGTGCGAGTTACTATGTGGACTCTGTGAAGGGCCGATTCACCATCTCCAGAGACGACG
CCAAGAACTCACTGTATCTGCAAATGAACAGCCTGAGAGCTGAGGACACGGCTGTGTATTACTGTGCGAGAGATCGT
GGGGTGGGCTACTTCGATCTCTGGGGCCGTGGCACCCTGGTCACCGTCTCGAGCGGCGGTGGAGGGTCCGGCGGTGG
TGGATCAGACGTCGTGATGACCCAGTCTCCTTCCACCCTGTCTGCATCTGTAGGAGACAGAGTCACCATCAATTGCC
AAGCCAGTGAGAGCATTAGCAGTTGGTTAGCCTGGTATCAGCAGAAACCAGGGAAAGCCCCTAAGCTCCTGATCTAT
GAAGCATCCAAACTGGCATCTGGGGTCCCATCAAGGTTCAGCGGCAGTGGATCTGGGACAGAATTCACTCTCACCAT
CAGCAGCCTGCAGCCTGATGATTTTGCAACTTATTACTGCCAAGGCTATTTTTATTTTATTAGTCGTACTTATGTAA
ATTCTTTCGGCGGAGGGACCAAGGTGGAGATCAAACGTACGGTGGCTGCACCATCTGTCTTCATCTTCCCGCCATCT
GATGAGCAGTTGAAATCTGGAACTGCCTCTGTTGTGTGCCTGCTGAATAACTTCTATCCCAGAGAGGCCAAAGTACA
GTGGAAGGTGGATAACGCCCTCCAATCGGGTAACTCCCAGGAGAGTGTCACAGAGCAGGACAGCAAGGACAGCACCT
ACAGCCTCAGCAGCACCCTGACGCTGAGCAAAGCAGACTACGAGAAACACAAAGTCTACGCCTGCGAAGTCACCCAT
CAGGGCCTGAGCTCGCCCGTCACAAAGAGCTTCAACAGGGGAGAGTGTGGAGGCGACAAAACTCACACATGCCCACC
GTGCCCAGCACCTGAAGCCGCGGGGGGACCGTCAGTCTTCCTCTTCCCCCCAAAACCCAAGGACACCCTCATGATCT
CCCGGACCCCTGAGGTCACATGCGTGGTGGTGGACGTGAGCCACGAAGACCCTGAGGTCAAGTTCAACTGGTACGTG
GACGGCGTGGAGGTGCATAATGCCAAGACAAAGCCGCGGGAGGAGCAGTACAACAGCACGTACCGTGTGGTCAGCGT
CCTCACCGTCCTGCACCAGGACTGGCTGAATGGCAAGGAGTACAAGTGCGCGGTCTCCAACAAAGCCCTCCCAGCCC
CCATCGAGAAAACCATCTCCAAAGCCAAAGGGCAGCCCCGAGAACCACAGGTGTACACCCTGCCCCCAAGCCGGGAT
GAGCTGACCAAGAACCAGGTCAGCCTGTGGTGCCTGGTCAAAGGCTTCTATCCCAGCGACATCGCCGTGGAGTGGGA
GAGCAATGGGCAGCCGGAGAACAACTACAAGACCACGCCTCCCGTGCTGGACTCCGACGGCTCCTTCTTCCTCTATA
GCAAGCTCACCGTGGACAAGAGCAGGTGGCAGCAGGGGAACGTCTTCTCATGCTCCGTGATGCATGAGGCTCTGCAC
AACAGATTCACGCAGAAGAGCCTCTCCCTGTCTCCGGGTGGCGGTGGAGGGTCCGGCGGTGGTGGATCCGACATTCA
GATGACACAGTCACCGTCTACGCTCTCAGCCTCAGTAGGCGATAGGGTGACTATCACCTGCCAAGCCTCCCAATCTA
TAAGTTCACACCTCAACTGGTATCAACAGAAACCCGGTAAAGCACCGAAGCTGCTCATCTACAAGGCATCAACTCTT
GCCTCAGGTGTGCCTAGTCGCTTCTCCGGGAGCGGCTCCGGTACTGAGTTTACTTTGACGATATCTTCCCTCCAACC
CGACGACTTCGCCACATACTATTGTCAGCAGGGTTATAGTTGGGGAAATGTTGACAATGTGTTTGGAGGGGGAACGA
AAGTGACTGTGTTGGGAGGGGGAGGAAGTGGCGGCGGCGGAAGCGGAGGTGGTGGCTCCGGCGGGGGTGGAAGCGAA
GTGCAATTGCTCGAAAGTGGTGGCGGACTTGTGCAACCTGGTGGAAGCCTCTCACTCTCTTGCGCGGCGAGTGGTTT
TAGCTTCAGTAGCGGCTACGATATGTGCTGGGTAAGACAGGCTCCTGGTAAAGGCCTTGAGTGGATTGCGTGTATCG
CCGCCGGGTCTGCTGGTATAACATACGATGCAAACTGGGCGAAAGGGCGCTTCACAATCTCCAGGGACAACTCAAAA
AATACATTGTACCTCCAGATGAATAGCCTGAGAGCCGAAGACACCGCAGTCTACTATTGCGCAAGGTCAGCATTTAG
CTTCGATTATGCAATGGATCTTTGGGGCCAGGGGACGCTCGTCACCGTCTCATCTTGA
>Sequence ID 25: SI-75P3 Chain A Amino Acid Sequence
EIVLTQSPSTLSVSPGERATFSCRASQSIGTNIHWYQQKPGKPPRLLIKYASESISGIPDRFSGSGSGTEFTLTISS
VQSEDFAVYYCQQNNNWPTTFGPGTKLTVLGGGGSGGGGSGGGGSGGGGSQVQLQQSGPGLVKPSETLSITCTVSGF
SLTNYGVHWIRQAPGKGLEWLGVIWSGGNTDYNTPFTSRFTITKDNSKNQVYFKLRSVRADDTAIYYCARALTYYDY
EFAYWGQGTLVTVSSGGGGSGGGGSEVQLVESGGGLVQPGGSLRLSCAASGFTISTNAMSWVRQAPGKGLEWIGVIT
GRDITYYASWAKGRFTISRDNSKNTLYLQMNSLRAEDTAVYYCARDGGSSAITSNNIWGQGTLVTVSSASTKGPSVF
PLAPSSKSTSGGTAALGCLVKDYFPEPVTVSWNSGALTSGVHTFPAVLQSSGLYSLSSVVTVPSSSLGTQTYICNVN
HKPSNTKVDKRVEPKSCDKTHTCPPCPAPEAAGGPSVFLFPPKPKDTLMISRTPEVTCVVVDVSHEDPEVKFNWYVD
GVEVHNAKTKPREEQYNSTYRVVSVLTVLHQDWLNGKEYKCAVSNKALPAPIEKTISKAKGQPREPQVYTLPPSRDE
LTKNQVSLSCAVKGFYPSDIAVEWESNGQPENNYKTTPPVLDSDGSFFLVSKLTVDKSRWQQGNVFSCSVMHEALHN
HYTQKSLSLSPGGGGGSGGGGSDVVMTQSPSSVSASVGDRVTITCQASQNIRTYLSWYQQKPGKAPKLLIYAAANLA
SGVPSRFSGSGSGTDFTLTISDLEPGDAATYYCQSTYLGTDYVGGAFGGGTKLTVLGGGGSGGGGSGGGGSGGGGSE
VQLVESGGGLVQPGGSLRLSCTASGFTISSYHMQWVRQAPGKGLEYIGTISSGGNVYYASSARGRFTISRPSSKNTV
DLQMNSLRAEDTAVYYCARDSGYSDPMWGQGTLVTVSS
>Sequence ID 26: SI-75P3 Chain A Nucleotide Sequence
GAAATCGTCCTTACACAATCTCCTAGCACACTGAGTGTGAGCCCCGGCGAACGCGCGACTTTCTCTTGCAGGGCAAG
TCAATCCATAGGGACTAATATACATTGGTATCAACAAAAGCCAGGTAAACCACCCAGGCTTTTGATTAAGTATGCAA
GTGAGTCTATTTCCGGTATCCCTGACCGCTTCTCTGGATCAGGCAGTGGCACAGAGTTCACACTCACCATATCTAGT
GTGCAATCAGAGGACTTCGCCGTGTATTACTGCCAACAGAATAATAACTGGCCGACTACCTTCGGACCCGGTACAAA
GCTGACCGTTTTAGGCGGTGGCGGTAGTGGGGGAGGCGGTTCTGGCGGCGGAGGGTCCGGCGGTGGAGGATCACAAG
TACAGTTGCAGCAATCCGGTCCCGGTCTCGTCAAACCGAGTGAGACGCTTAGTATAACGTGTACTGTTTCAGGCTTT
AGCCTTACGAACTATGGAGTTCACTGGATTCGGCAGGCACCCGGCAAAGGTTTGGAATGGCTGGGTGTTATTTGGTC
AGGTGGAAATACAGACTATAACACCCCCTTTACAAGTCGGTTCACAATTACGAAAGATAATTCCAAAAATCAAGTTT
ATTTCAAGTTGAGATCCGTCCGCGCGGACGACACTGCGATCTACTATTGTGCGAGGGCACTGACCTACTACGATTAC
GAATTTGCGTATTGGGGGCAAGGGACTCTTGTAACAGTCTCGAGCGGCGGTGGAGGGTCCGGCGGTGGTGGATCAGA
GGTGCAGCTGGTGGAGTCTGGGGGAGGCTTGGTCCAGCCTGGGGGGTCCCTGAGACTCTCCTGTGCAGCCTCTGGAT
TCACCATCAGTACCAATGCAATGAGCTGGGTCCGCCAGGCTCCAGGGAAGGGGCTGGAGTGGATCGGAGTCATTACT
GGTCGTGATATCACATACTACGCGAGCTGGGCGAAAGGCAGATTCACCATCTCCAGAGACAATTCCAAGAACACGCT
GTATCTTCAAATGAACAGCCTGAGAGCCGAGGACACGGCTGTGTATTACTGTGCGAGAGACGGTGGTTCTTCTGCTA
TTACTAGTAACAACATTTGGGGCCAGGGAACCCTGGTCACCGTGTCCTCAGCTAGCACCAAGGGCCCATCGGTCTTC
CCCCTGGCACCCTCCTCCAAGAGCACCTCTGGGGGCACAGCGGCCCTGGGCTGCCTGGTCAAGGACTACTTCCCCGA
ACCGGTGACGGTGTCGTGGAACTCAGGCGCCCTGACCAGCGGCGTGCACACCTTCCCGGCTGTCCTACAGTCCTCAG
GACTCTACTCCCTCAGCAGCGTGGTGACCGTGCCCTCCAGCAGCTTGGGCACCCAGACCTACATCTGCAACGTGAAT
CACAAGCCCAGCAACACCAAGGTGGACAAGAGAGTTGAGCCCAAATCTTGTGACAAAACTCACACATGCCCACCGTG
CCCAGCACCTGAAGCCGCGGGGGGACCGTCAGTCTTCCTCTTCCCCCCAAAACCCAAGGACACCCTCATGATCTCCC
GGACCCCTGAGGTCACATGCGTGGTGGTGGACGTGAGCCACGAAGACCCTGAGGTCAAGTTCAACTGGTACGTGGAC
GGCGTGGAGGTGCATAATGCCAAGACAAAGCCGCGGGAGGAGCAGTACAACAGCACGTACCGTGTGGTCAGCGTCCT
CACCGTCCTGCACCAGGACTGGCTGAATGGCAAGGAGTACAAGTGCGCGGTCTCCAACAAAGCCCTCCCAGCCCCCA
TCGAGAAAACCATCTCCAAAGCCAAAGGGCAGCCCCGAGAACCACAGGTGTATACCCTGCCCCCATCCCGGGATGAG
CTGACCAAGAACCAGGTCAGCCTGTCCTGCGCCGTCAAAGGCTTCTATCCCAGCGACATCGCCGTGGAGTGGGAGAG
CAATGGGCAGCCGGAGAACAACTACAAGACCACGCCTCCCGTGCTGGACTCCGACGGCTCCTTCTTCCTCGTGAGCA
AGCTCACCGTGGACAAGAGCAGGTGGCAGCAGGGGAACGTCTTCTCATGCTCCGTGATGCATGAGGCTCTGCACAAC
CACTACACGCAGAAGAGCCTCTCCCTGTCTCCGGGTGGCGGCGGCGGTTCAGGTGGTGGGGGATCCGACGTTGTGAT
GACGCAGTCTCCTAGTTCAGTATCAGCGTCTGTTGGGGATCGAGTCACGATTACATGCCAGGCGAGCCAAAATATTA
GGACGTATCTGTCTTGGTATCAACAAAAGCCTGGTAAGGCTCCAAAACTCCTCATTTACGCCGCTGCCAACTTGGCT
AGTGGAGTACCTTCACGCTTTAGTGGGTCAGGTTCTGGAACAGATTTTACGTTGACGATCTCCGATTTGGAACCAGG
GGACGCTGCCACGTATTATTGCCAGTCCACCTACCTCGGGACTGACTACGTTGGTGGGGCGTTTGGCGGAGGAACAA
AACTCACTGTACTTGGTGGTGGTGGTTCAGGCGGGGGGGGTTCCGGCGGAGGCGGTTCTGGGGGTGGAGGTTCCGAG
GTTCAGTTGGTTGAAAGTGGGGGGGGACTCGTTCAGCCTGGAGGCTCTTTGCGACTTTCTTGTACCGCTTCTGGGTT
CACTATAAGTTCATATCATATGCAATGGGTAAGACAGGCGCCTGGTAAGGGACTTGAATACATAGGAACAATAAGCT
CTGGTGGTAACGTCTATTACGCCTCATCCGCGCGGGGGAGGTTTACAATTTCCAGGCCTTCTAGCAAAAACACGGTA
GATCTGCAAATGAACTCTCTTCGCGCTGAAGATACAGCAGTCTACTACTGCGCCAGGGATTCAGGGTATTCTGACCC
CATGTGGGGGCAGGGCACATTGGTTACCGTGTCCTCT
>Sequence ID 27: SI-75P3 Chain B Amino Acid Sequence
QSALTQPASVSGSPGQSITISCTGTSSDVGGYNFVSWYQQHPGKAPKLMIYDVSDRPSGVSDRFSGSKSGNTASLII
SGLQADDEADYYCSSYGSSSTHVIFGGGTKVTVLGGGGSGGGGSGGGGSGGGGSQVQLQESGGGLVKPGGSLSLSCA
ASGFTFSSYWMSWVRQAPGKGLEWVANINRDGSASYYVDSVKGRFTISRDDAKNSLYLQMNSLRAEDTAVYYCARDR
GVGYFDLWGRGTLVTVSSGGGGSGGGGSDVVMTQSPSTLSASVGDRVTINCQASESISSWLAWYQQKPGKAPKLLIY
EASKLASGVPSRFSGSGSGTEFTLTISSLQPDDFATYYCQGYFYFISRTYVNSFGGGTKVEIKRTVAAPSVFIFPPS
DEQLKSGTASVVCLLNNFYPREAKVQWKVDNALQSGNSQESVTEQDSKDSTYSLSSTLTLSKADYEKHKVYACEVTH
QGLSSPVTKSFNRGECGGDKTHTCPPCPAPEAAGGPSVFLFPPKPKDTLMISRTPEVTCVVVDVSHEDPEVKFNWYV
DGVEVHNAKTKPREEQYNSTYRVVSVLTVLHQDWLNGKEYKCAVSNKALPAPIEKTISKAKGQPREPQVYTLPPSRD
ELTKNQVSLWCLVKGFYPSDIAVEWESNGQPENNYKTTPPVLDSDGSFFLYSKLTVDKSRWQQGNVFSCSVMHEALH
NRFTQKSLSLSPGGGGGSGGGGSDIQMTQSPSTLSASVGDRVTITCQASQSISSHLNWYQQKPGKAPKLLIYKASTL
ASGVPSRFSGSGSGTEFTLTISSLQPDDFATYYCQQGYSWGNVDNVFGGGTKVTVLGGGGSGGGGSGGGGSGGGGSE
VQLLESGGGLVQPGGSLSLSCAASGFSFSSGYDMCWVRQAPGKGLEWIACIAAGSAGITYDANWAKGRFTISRDNSK
NTLYLQMNSLRAEDTAVYYCARSAFSFDYAMDLWGQGTLVTVSS
>Sequence ID 28: SI-75P3 Chain B Nucleotide Sequence
CAGTCTGCCCTGACTCAGCCTGCCTCCGTGTCTGGGTCTCCTGGACAGTCGATCACCATCTCCTGCACTGGAACCAG
CAGTGACGTTGGTGGTTATAACTTTGTCTCCTGGTACCAACAACACCCAGGCAAAGCCCCCAAACTCATGATCTATG
ATGTCAGTGATCGGCCCTCAGGGGTGTCTGATCGCTTCTCCGGCTCCAAGTCTGGCAACACGGCCTCCCTGATCATC
TCTGGCCTCCAGGCTGACGACGAGGCTGATTATTACTGCAGCTCATATGGGAGCAGCAGCACTCATGTGATTTTCGG
CGGAGGGACCAAGGTGACCGTCCTAGGCGGTGGCGGTAGTGGGGGAGGCGGTTCTGGCGGCGGAGGGTCCGGCGGTG
GAGGATCACAGGTGCAATTGCAGGAGTCGGGGGGAGGCCTGGTCAAGCCTGGAGGGTCCCTGAGCCTCTCCTGTGCA
GCCTCTGGATTCACCTTTAGTAGTTATTGGATGAGCTGGGTCCGCCAGGCTCCAGGGAAGGGGCTGGAGTGGGTGGC
CAACATAAACCGCGATGGAAGTGCGAGTTACTATGTGGACTCTGTGAAGGGCCGATTCACCATCTCCAGAGACGACG
CCAAGAACTCACTGTATCTGCAAATGAACAGCCTGAGAGCTGAGGACACGGCTGTGTATTACTGTGCGAGAGATCGT
GGGGTGGGCTACTTCGATCTCTGGGGCCGTGGCACCCTGGTCACCGTCTCGAGCGGCGGTGGAGGGTCCGGCGGTGG
TGGATCAGACGTCGTGATGACCCAGTCTCCTTCCACCCTGTCTGCATCTGTAGGAGACAGAGTCACCATCAATTGCC
AAGCCAGTGAGAGCATTAGCAGTTGGTTAGCCTGGTATCAGCAGAAACCAGGGAAAGCCCCTAAGCTCCTGATCTAT
GAAGCATCCAAACTGGCATCTGGGGTCCCATCAAGGTTCAGCGGCAGTGGATCTGGGACAGAATTCACTCTCACCAT
CAGCAGCCTGCAGCCTGATGATTTTGCAACTTATTACTGCCAAGGCTATTTTTATTTTATTAGTCGTACTTATGTAA
ATTCTTTCGGCGGAGGGACCAAGGTGGAGATCAAACGTACGGTGGCTGCACCATCTGTCTTCATCTTCCCGCCATCT
GATGAGCAGTTGAAATCTGGAACTGCCTCTGTTGTGTGCCTGCTGAATAACTTCTATCCCAGAGAGGCCAAAGTACA
GTGGAAGGTGGATAACGCCCTCCAATCGGGTAACTCCCAGGAGAGTGTCACAGAGCAGGACAGCAAGGACAGCACCT
ACAGCCTCAGCAGCACCCTGACGCTGAGCAAAGCAGACTACGAGAAACACAAAGTCTACGCCTGCGAAGTCACCCAT
CAGGGCCTGAGCTCGCCCGTCACAAAGAGCTTCAACAGGGGAGAGTGTGGAGGCGACAAAACTCACACATGCCCACC
GTGCCCAGCACCTGAAGCCGCGGGGGGACCGTCAGTCTTCCTCTTCCCCCCAAAACCCAAGGACACCCTCATGATCT
CCCGGACCCCTGAGGTCACATGCGTGGTGGTGGACGTGAGCCACGAAGACCCTGAGGTCAAGTTCAACTGGTACGTG
GACGGCGTGGAGGTGCATAATGCCAAGACAAAGCCGCGGGAGGAGCAGTACAACAGCACGTACCGTGTGGTCAGCGT
CCTCACCGTCCTGCACCAGGACTGGCTGAATGGCAAGGAGTACAAGTGCGCGGTCTCCAACAAAGCCCTCCCAGCCC
CCATCGAGAAAACCATCTCCAAAGCCAAAGGGCAGCCCCGAGAACCACAGGTGTACACCCTGCCCCCAAGCCGGGAT
GAGCTGACCAAGAACCAGGTCAGCCTGTGGTGCCTGGTCAAAGGCTTCTATCCCAGCGACATCGCCGTGGAGTGGGA
GAGCAATGGGCAGCCGGAGAACAACTACAAGACCACGCCTCCCGTGCTGGACTCCGACGGCTCCTTCTTCCTCTATA
GCAAGCTCACCGTGGACAAGAGCAGGTGGCAGCAGGGGAACGTCTTCTCATGCTCCGTGATGCATGAGGCTCTGCAC
AACAGATTCACGCAGAAGAGCCTCTCCCTGTCTCCGGGTGGCGGTGGAGGGTCCGGCGGTGGTGGATCCGACATTCA
GATGACACAGTCACCGTCTACGCTCTCAGCCTCAGTAGGCGATAGGGTGACTATCACCTGCCAAGCCTCCCAATCTA
TAAGTTCACACCTCAACTGGTATCAACAGAAACCCGGTAAAGCACCGAAGCTGCTCATCTACAAGGCATCAACTCTT
GCCTCAGGTGTGCCTAGTCGCTTCTCCGGGAGCGGCTCCGGTACTGAGTTTACTTTGACGATATCTTCCCTCCAACC
CGACGACTTCGCCACATACTATTGTCAGCAGGGTTATAGTTGGGGAAATGTTGACAATGTGTTTGGAGGGGGAACGA
AAGTGACTGTGTTGGGAGGGGGAGGAAGTGGCGGCGGCGGAAGCGGAGGTGGTGGCTCCGGCGGGGGTGGAAGCGAA
GTGCAATTGCTCGAAAGTGGTGGCGGACTTGTGCAACCTGGTGGAAGCCTCTCACTCTCTTGCGCGGCGAGTGGTTT
TAGCTTCAGTAGCGGCTACGATATGTGCTGGGTAAGACAGGCTCCTGGTAAAGGCCTTGAGTGGATTGCGTGTATCG
CCGCCGGGTCTGCTGGTATAACATACGATGCAAACTGGGCGAAAGGGCGCTTCACAATCTCCAGGGACAACTCAAAA
AATACATTGTACCTCCAGATGAATAGCCTGAGAGCCGAAGACACCGCAGTCTACTATTGCGCAAGGTCAGCATTTAG
CTTCGATTATGCAATGGATCTTTGGGGCCAGGGGACGCTCGTCACCGTCTCATCTTGA
>Sequence ID 29: SI-75P9 Chain A Amino Acid Sequence
EIVLTQSPSTLSVSPGERATFSCRASQSIGTNIHWYQQKPGKPPRLLIKYASESISGIPDRFSGSGSGTEFTLTISS
VQSEDFAVYYCQQNNNWPTTFGPGTKLTVLGGGGSGGGGSGGGGSGGGGSQVQLQQSGPGLVKPSETLSITCTVSGF
SLTNYGVHWIRQAPGKGLEWLGVIWSGGNTDYNTPFTSRFTITKDNSKNQVYFKLRSVRADDTAIYYCARALTYYDY
EFAYWGQGTLVTVSSGGGGSGGGGSQVQLQESGGGLVKPGGSLRLSCAASGFTFSSYWMSWVRQAPGKGLEWVANIN
RDGSASYYVDSVKGRFTISRDDAKNSLYLQMNSLRAEDTAVYYCARDRGVGYFDLWGRGTLVTVSSASTKGPSVFPL
APSSKSTSGGTAALGCLVKDYFPEPVTVSWNSGALTSGVHTFPAVLQSSGLYSLSSVVTVPSSSLGTQTYICNVNHK
PSNTKVDKRVEPKSCDKTHTCPPCPAPEAAGGPSVFLFPPKPKDTLMISRTPEVTCVVVDVSHEDPEVKFNWYVDGV
EVHNAKTKPREEQYNSTYRVVSVLTVLHQDWLNGKEYKCAVSNKALPAPIEKTISKAKGQPREPQVYTLPPSRDELT
KNQVSLSCAVKGFYPSDIAVEWESNGQPENNYKTTPPVLDSDGSFFLVSKLTVDKSRWQQGNVFSCSVMHEALHNHY
TQKSLSLSPGGGGGSGGGGSDVVMTQSPSSVSASVGDRVTITCQASQNIRTYLSWYQQKPGKAPKLLIYAAANLASG
VPSRFSGSGSGTDFTLTISDLEPGDAATYYCQSTYLGTDYVGGAFGGGTKLTVLGGGGSGGGGSGGGGSGGGGSEVQ
LVESGGGLVQPGGSLRLSCTASGFTISSYHMQWVRQAPGKGLEYIGTISSGGNVYYASSARGRFTISRPSSKNTVDL
QMNSLRAEDTAVYYCARDSGYSDPMWGQGTLVTVSS
>Sequence ID 30: SI-75P9 Chain A Nucleotide
GAAATCGTCCTTACACAATCTCCTAGCACACTGAGTGTGAGCCCCGGCGAACGCGCGACTTTCTCTTGCAGGGCAAG
TCAATCCATAGGGACTAATATACATTGGTATCAACAAAAGCCAGGTAAACCACCCAGGCTTTTGATTAAGTATGCAA
GTGAGTCTATTTCCGGTATCCCTGACCGCTTCTCTGGATCAGGCAGTGGCACAGAGTTCACACTCACCATATCTAGT
GTGCAATCAGAGGACTTCGCCGTGTATTACTGCCAACAGAATAATAACTGGCCGACTACCTTCGGACCCGGTACAAA
GCTGACCGTTTTAGGCGGTGGCGGTAGTGGGGGAGGCGGTTCTGGCGGCGGAGGGTCCGGCGGTGGAGGATCACAAG
TACAGTTGCAGCAATCCGGTCCCGGTCTCGTCAAACCGAGTGAGACGCTTAGTATAACGTGTACTGTTTCAGGCTTT
AGCCTTACGAACTATGGAGTTCACTGGATTCGGCAGGCACCCGGCAAAGGTTTGGAATGGCTGGGTGTTATTTGGTC
AGGTGGAAATACAGACTATAACACCCCCTTTACAAGTCGGTTCACAATTACGAAAGATAATTCCAAAAATCAAGTTT
ATTTCAAGTTGAGATCCGTCCGCGCGGACGACACTGCGATCTACTATTGTGCGAGGGCACTGACCTACTACGATTAC
GAATTTGCGTATTGGGGGCAAGGGACTCTTGTAACAGTCTCGAGCGGCGGTGGAGGGTCCGGCGGTGGTGGATCACA
GGTGCAGCTGCAGGAGAGTGGAGGAGGCCTGGTGAAGCCTGGAGGCAGCCTGCGGCTGTCCTGTGCTGCCTCTGGCT
TCACCTTCTCCTCCTACTGGATGAGCTGGGTGCGCCAGGCCCCAGGCAAGGGCCTGGAGTGGGTGGCCAACATCAAC
AGAGATGGCTCTGCCTCCTACTATGTGGACTCTGTGAAAGGCCGCTTCACCATCTCCAGAGATGATGCCAAGAACAG
CCTGTACCTGCAGATGAACAGCCTGAGAGCTGAGGACACAGCTGTGTACTACTGTGCCAGAGACCGAGGTGTGGGCT
ACTTTGACCTGTGGGGCAGAGGCACCCTGGTGACTGTGTCCTCTGCTAGCACCAAGGGCCCATCGGTCTTCCCCCTG
GCACCCTCCTCCAAGAGCACCTCTGGGGGCACAGCGGCCCTGGGCTGCCTGGTCAAGGACTACTTCCCCGAACCGGT
GACGGTGTCGTGGAACTCAGGCGCCCTGACCAGCGGCGTGCACACCTTCCCGGCTGTCCTACAGTCCTCAGGACTCT
ACTCCCTCAGCAGCGTGGTGACCGTGCCCTCCAGCAGCTTGGGCACCCAGACCTACATCTGCAACGTGAATCACAAG
CCCAGCAACACCAAGGTGGACAAGAGAGTTGAGCCCAAATCTTGTGACAAAACTCACACATGCCCACCGTGCCCAGC
ACCTGAAGCCGCGGGGGGACCGTCAGTCTTCCTCTTCCCCCCAAAACCCAAGGACACCCTCATGATCTCCCGGACCC
CTGAGGTCACATGCGTGGTGGTGGACGTGAGCCACGAAGACCCTGAGGTCAAGTTCAACTGGTACGTGGACGGCGTG
GAGGTGCATAATGCCAAGACAAAGCCGCGGGAGGAGCAGTACAACAGCACGTACCGTGTGGTCAGCGTCCTCACCGT
CCTGCACCAGGACTGGCTGAATGGCAAGGAGTACAAGTGCGCGGTCTCCAACAAAGCCCTCCCAGCCCCCATCGAGA
AAACCATCTCCAAAGCCAAAGGGCAGCCCCGAGAACCACAGGTGTATACCCTGCCCCCATCCCGGGATGAGCTGACC
AAGAACCAGGTCAGCCTGTCCTGCGCCGTCAAAGGCTTCTATCCCAGCGACATCGCCGTGGAGTGGGAGAGCAATGG
GCAGCCGGAGAACAACTACAAGACCACGCCTCCCGTGCTGGACTCCGACGGCTCCTTCTTCCTCGTGAGCAAGCTCA
CCGTGGACAAGAGCAGGTGGCAGCAGGGGAACGTCTTCTCATGCTCCGTGATGCATGAGGCTCTGCACAACCACTAC
ACGCAGAAGAGCCTCTCCCTGTCTCCGGGTGGCGGCGGCGGTTCAGGTGGTGGGGGATCCGACGTTGTGATGACGCA
GTCTCCTAGTTCAGTATCAGCGTCTGTTGGGGATCGAGTCACGATTACATGCCAGGCGAGCCAAAATATTAGGACGT
ATCTGTCTTGGTATCAACAAAAGCCTGGTAAGGCTCCAAAACTCCTCATTTACGCCGCTGCCAACTTGGCTAGTGGA
GTACCTTCACGCTTTAGTGGGTCAGGTTCTGGAACAGATTTTACGTTGACGATCTCCGATTTGGAACCAGGGGACGC
TGCCACGTATTATTGCCAGTCCACCTACCTCGGGACTGACTACGTTGGTGGGGCGTTTGGCGGAGGAACAAAACTCA
CTGTACTTGGTGGTGGTGGTTCAGGCGGGGGGGGTTCCGGCGGAGGCGGTTCTGGGGGTGGAGGTTCCGAGGTTCAG
TTGGTTGAAAGTGGGGGGGGACTCGTTCAGCCTGGAGGCTCTTTGCGACTTTCTTGTACCGCTTCTGGGTTCACTAT
AAGTTCATATCATATGCAATGGGTAAGACAGGCGCCTGGTAAGGGACTTGAATACATAGGAACAATAAGCTCTGGTG
GTAACGTCTATTACGCCTCATCCGCGCGGGGGAGGTTTACAATTTCCAGGCCTTCTAGCAAAAACACGGTAGATCTG
CAAATGAACTCTCTTCGCGCTGAAGATACAGCAGTCTACTACTGCGCCAGGGATTCAGGGTATTCTGACCCCATGTG
GGGGCAGGGCACATTGGTTACCGTGTCCTCTTGA
>Sequence ID 31: SI-75P9 Chain B Amino Acid Sequence
DVVMTQSPSTLSASVGDRVTINCQASESISSWLAWYQQKPGKAPKLLIYEASKLASGVPSRFSGSGSGTEFTLTISS
LQPDDFATYYCQGYFYFISRTYVNSFGGGTKVEIKGGGGSGGGGSGGGGSGGGGSEVQLVESGGGLVQPGGSLRLSC
AASGFTISTNAMSWVRQAPGKGLEWIGVITGRDITYYASWAKGRFTISRDNSKNTLYLQMNSLRAEDTAVYYCARDG
GSSAITSNNIWGQGTLVTVSSGGGGSGGGGSQSALTQPASVSGSPGQSITISCTGTSSDVGGYNFVSWYQQHPGKAP
KLMIYDVSDRPSGVSDRFSGSKSGNTASLIISGLQADDEADYYCSSYGSSSTHVIFGGGTKVTVLRTPKANPTVTLF
PPSSEELQANKATLVCLISDFYPGAVTVAWKADGSPVKAGVETTKPSKQSNNKYAASSYLSLTPEQWKSHRSYSCQV
THEGSTVEKTVAPTECSGGDKTHTCPPCPAPEAAGGPSVFLFPPKPKDTLMISRTPEVTCVVVDVSHEDPEVKFNWY
VDGVEVHNAKTKPREEQYNSTYRVVSVLTVLHQDWLNGKEYKCAVSNKALPAPIEKTISKAKGQPREPQVYTLPPSR
DELTKNQVSLWCLVKGFYPSDIAVEWESNGQPENNYKTTPPVLDSDGSFFLYSKLTVDKSRWQQGNVFSCSVMHEAL
HNRFTQKSLSLSPGGGGGSGGGGSDIQMTQSPSTLSASVGDRVTITCQASQSISSHLNWYQQKPGKAPKLLIYKAST
LASGVPSRFSGSGSGTEFTLTISSLQPDDFATYYCQQGYSWGNVDNVFGGGTKVTVLGGGGSGGGGSGGGGSGGGGS
EVQLLESGGGLVQPGGSLSLSCAASGFSFSSGYDMCWVRQAPGKGLEWIACIAAGSAGITYDANWAKGRFTISRDNS
KNTLYLQMNSLRAEDTAVYYCARSAFSFDYAMDLWGQGTLVTVSS
>Sequence ID 32: SI-75P9 Chain B Nucleotide Sequence
GACGTCGTGATGACCCAGTCTCCTTCCACCCTGTCTGCATCTGTAGGAGACAGAGTCACCATCAATTGCCAAGCCAG
TGAGAGCATTAGCAGTTGGTTAGCCTGGTATCAGCAGAAACCAGGGAAAGCCCCTAAGCTCCTGATCTATGAAGCAT
CCAAACTGGCATCTGGGGTCCCATCAAGGTTCAGCGGCAGTGGATCTGGGACAGAATTCACTCTCACCATCAGCAGC
CTGCAGCCTGATGATTTTGCAACTTATTACTGCCAAGGCTATTTTTATTTTATTAGTCGTACTTATGTAAATTCTTT
CGGCGGAGGGACCAAGGTGGAGATCAAAGGCGGTGGCGGTAGTGGGGGAGGCGGTTCTGGCGGCGGAGGGTCCGGCG
GTGGAGGATCAGAGGTGCAGCTGGTGGAGTCTGGGGGAGGCTTGGTCCAGCCTGGGGGGTCCCTGAGACTCTCCTGT
GCAGCCTCTGGATTCACCATCAGTACCAATGCAATGAGCTGGGTCCGCCAGGCTCCAGGGAAGGGGCTGGAGTGGAT
CGGAGTCATTACTGGTCGTGATATCACATACTACGCGAGCTGGGCGAAAGGCAGATTCACCATCTCCAGAGACAATT
CCAAGAACACGCTGTATCTTCAAATGAACAGCCTGAGAGCCGAGGACACGGCTGTGTATTACTGTGCGAGAGACGGT
GGTTCTTCTGCTATTACTAGTAACAACATTTGGGGCCAGGGAACCCTGGTCACCGTGTCCTCAGGCGGTGGAGGGTC
CGGCGGTGGTGGATCACAGAGTGCCCTGACCCAGCCAGCCTCTGTCTCTGGCAGCCCAGGCCAGTCCATCACCATCT
CCTGCACAGGCACCTCCAGTGATGTGGGAGGCTACAACTTTGTGTCCTGGTACCAGCAGCACCCAGGCAAGGCCCCC
AAGCTCATGATCTATGATGTGTCTGACAGACCCTCTGGAGTCTCTGACAGATTCTCTGGCTCCAAGAGTGGCAACAC
AGCCTCCCTCATCATCTCTGGCCTGCAGGCTGATGATGAAGCTGACTACTACTGCTCCTCCTATGGCTCCTCCTCCA
CCCATGTCATCTTTGGAGGAGGCACCAAGGTCACTGTGCTGCGTACGCCCAAGGCCAACCCCACCGTGACCCTGTTC
CCCCCAAGCAGCGAGGAACTGCAGGCCAACAAGGCCACCCTCGTGTGCCTGATCAGCGACTTCTACCCTGGCGCCGT
GACCGTGGCCTGGAAGGCCGATGGATCTCCCGTGAAGGCCGGCGTGGAAACCACCAAGCCCAGCAAGCAGAGCAACA
ACAAATACGCCGCCAGCTCCTACCTGAGCCTGACCCCCGAGCAGTGGAAGTCCCACCGGTCCTACAGCTGCCAGGTC
ACACACGAAGGCAGCACCGTGGAAAAGACAGTGGCCCCCACCGAGTGCAGCGGAGGCGACAAAACTCACACATGCCC
ACCGTGCCCAGCACCTGAAGCCGCGGGGGGACCGTCAGTCTTCCTCTTCCCCCCAAAACCCAAGGACACCCTCATGA
TCTCCCGGACCCCTGAGGTCACATGCGTGGTGGTGGACGTGAGCCACGAAGACCCTGAGGTCAAGTTCAACTGGTAC
GTGGACGGCGTGGAGGTGCATAATGCCAAGACAAAGCCGCGGGAGGAGCAGTACAACAGCACGTACCGTGTGGTCAG
CGTCCTCACCGTCCTGCACCAGGACTGGCTGAATGGCAAGGAGTACAAGTGCGCGGTCTCCAACAAAGCCCTCCCAG
CCCCCATCGAGAAAACCATCTCCAAAGCCAAAGGGCAGCCCCGAGAACCACAGGTGTACACCCTGCCCCCAAGCCGG
GATGAGCTGACCAAGAACCAGGTCAGCCTGTGGTGCCTGGTCAAAGGCTTCTATCCCAGCGACATCGCCGTGGAGTG
GGAGAGCAATGGGCAGCCGGAGAACAACTACAAGACCACGCCTCCCGTGCTGGACTCCGACGGCTCCTTCTTCCTCT
ATAGCAAGCTCACCGTGGACAAGAGCAGGTGGCAGCAGGGGAACGTCTTCTCATGCTCCGTGATGCATGAGGCTCTG
CACAACAGATTCACGCAGAAGAGCCTCTCCCTGTCTCCGGGTGGCGGTGGAGGGTCCGGCGGTGGTGGATCCGACAT
TCAGATGACACAGTCACCGTCTACGCTCTCAGCCTCAGTAGGCGATAGGGTGACTATCACCTGCCAAGCCTCCCAAT
CTATAAGTTCACACCTCAACTGGTATCAACAGAAACCCGGTAAAGCACCGAAGCTGCTCATCTACAAGGCATCAACT
CTTGCCTCAGGTGTGCCTAGTCGCTTCTCCGGGAGCGGCTCCGGTACTGAGTTTACTTTGACGATATCTTCCCTCCA
ACCCGACGACTTCGCCACATACTATTGTCAGCAGGGTTATAGTTGGGGAAATGTTGACAATGTGTTTGGAGGGGGAA
CGAAAGTGACTGTGTTGGGAGGGGGAGGAAGTGGCGGCGGCGGAAGCGGAGGTGGTGGCTCCGGCGGGGGTGGAAGC
GAAGTGCAATTGCTCGAAAGTGGTGGCGGACTTGTGCAACCTGGTGGAAGCCTCTCACTCTCTTGCGCGGCGAGTGG
TTTTAGCTTCAGTAGCGGCTACGATATGTGCTGGGTAAGACAGGCTCCTGGTAAAGGCCTTGAGTGGATTGCGTGTA
TCGCCGCCGGGTCTGCTGGTATAACATACGATGCAAACTGGGCGAAAGGGCGCTTCACAATCTCCAGGGACAACTCA
AAAAATACATTGTACCTCCAGATGAATAGCCTGAGAGCCGAAGACACCGCAGTCTACTATTGCGCAAGGTCAGCATT
TAGCTTCGATTATGCAATGGATCTTTGGGGCCAGGGGACGCTCGTCACCGTCTCATCT
>Sequence ID 33: SI-75E1 Chain A Amino Acid Sequence
EIVLTQSPSTLSVSPGERATFSCRASQSIGTNIHWYQQKPGKPPRLLIKYASESISGIPDRFSGSGSGTEFTLTISS
VQSEDFAVYYCQQNNNWPTTFGPGTKLTVLGGGGSGGGGSGGGGSGGGGSQVQLQQSGPGLVKPSETLSITCTVSGF
SLTNYGVHWIRQAPGKGLEWLGVIWSGGNTDYNTPFTSRFTITKDNSKNQVYFKLRSVRADDTAIYYCARALTYYDY
EFAYWGQGTLVTVSSGGGGSGGGGSEVQLVESGGGLVQPGGSLRLSCAASGFTISTNAMSWVRQAPGKGLEWIGVIT
GRDITYYASWAKGRFTISRDNSKNTLYLQMNSLRAEDTAVYYCARDGGSSAITSNNIWGQGTLVTVSSASTKGPSVF
PLAPSSKSTSGGTAALGCLVKDYFPEPVTVSWNSGALTSGVHTFPAVLQSSGLYSLSSVVTVPSSSLGTQTYICNVN
HKPSNTKVDKRVEPKSCDKTHTCPPCPAPEAAGGPSVFLFPPKPKDTLMISRTPEVTCVVVDVSHEDPEVKFNWYVD
GVEVHNAKTKPREEQYNSTYRVVSVLTVLHQDWLNGKEYKCAVSNKALPAPIEKTISKAKGQPREPQVYTLPPSRDE
LTKNQVSLSCAVKGFYPSDIAVEWESNGQPENNYKTTPPVLDSDGSFFLVSKLTVDKSRWQQGNVFSCSVMHEALHN
HYTQKSLSLSPGGGGGSGGGGSDVVMTQSPSSVSASVGDRVTITCQASQNIRTYLSWYQQKPGKAPKLLIYAAANLA
SGVPSRFSGSGSGTDFTLTISDLEPGDAATYYCQSTYLGTDYVGGAFGGGTKLTVLGGGGSGGGGSGGGGSGGGGSE
VQLVESGGGLVQPGGSLRLSCTASGFTISSYHMQWVRQAPGKGLEYIGTISSGGNVYYASSARGRFTISRPSSKNTV
DLQMNSLRAEDTAVYYCARDSGYSDPMWGQGTLVTVSS
>Sequence ID 34: SI-75E1 Chain A Nucleotide Sequence
GAAATCGTCCTTACACAATCTCCTAGCACACTGAGTGTGAGCCCCGGCGAACGCGCGACTTTCTCTTGCAGGGCAAG
TCAATCCATAGGGACTAATATACATTGGTATCAACAAAAGCCAGGTAAACCACCCAGGCTTTTGATTAAGTATGCAA
GTGAGTCTATTTCCGGTATCCCTGACCGCTTCTCTGGATCAGGCAGTGGCACAGAGTTCACACTCACCATATCTAGT
GTGCAATCAGAGGACTTCGCCGTGTATTACTGCCAACAGAATAATAACTGGCCGACTACCTTCGGACCCGGTACAAA
GCTGACCGTTTTAGGCGGTGGCGGTAGTGGGGGAGGCGGTTCTGGCGGCGGAGGGTCCGGCGGTGGAGGATCACAAG
TACAGTTGCAGCAATCCGGTCCCGGTCTCGTCAAACCGAGTGAGACGCTTAGTATAACGTGTACTGTTTCAGGCTTT
AGCCTTACGAACTATGGAGTTCACTGGATTCGGCAGGCACCCGGCAAAGGTTTGGAATGGCTGGGTGTTATTTGGTC
AGGTGGAAATACAGACTATAACACCCCCTTTACAAGTCGGTTCACAATTACGAAAGATAATTCCAAAAATCAAGTTT
ATTTCAAGTTGAGATCCGTCCGCGCGGACGACACTGCGATCTACTATTGTGCGAGGGCACTGACCTACTACGATTAC
GAATTTGCGTATTGGGGGCAAGGGACTCTTGTAACAGTCTCGAGCGGCGGTGGAGGGTCCGGCGGTGGTGGATCAGA
GGTGCAGCTGGTGGAGTCTGGGGGAGGCTTGGTCCAGCCTGGGGGGTCCCTGAGACTCTCCTGTGCAGCCTCTGGAT
TCACCATCAGTACCAATGCAATGAGCTGGGTCCGCCAGGCTCCAGGGAAGGGGCTGGAGTGGATCGGAGTCATTACT
GGTCGTGATATCACATACTACGCGAGCTGGGCGAAAGGCAGATTCACCATCTCCAGAGACAATTCCAAGAACACGCT
GTATCTTCAAATGAACAGCCTGAGAGCCGAGGACACGGCTGTGTATTACTGTGCGAGAGACGGTGGTTCTTCTGCTA
TTACTAGTAACAACATTTGGGGCCAGGGAACCCTGGTCACCGTGTCCTCAGCTAGCACCAAGGGCCCATCGGTCTTC
CCCCTGGCACCCTCCTCCAAGAGCACCTCTGGGGGCACAGCGGCCCTGGGCTGCCTGGTCAAGGACTACTTCCCCGA
ACCGGTGACGGTGTCGTGGAACTCAGGCGCCCTGACCAGCGGCGTGCACACCTTCCCGGCTGTCCTACAGTCCTCAG
GACTCTACTCCCTCAGCAGCGTGGTGACCGTGCCCTCCAGCAGCTTGGGCACCCAGACCTACATCTGCAACGTGAAT
CACAAGCCCAGCAACACCAAGGTGGACAAGAGAGTTGAGCCCAAATCTTGTGACAAAACTCACACATGCCCACCGTG
CCCAGCACCTGAAGCCGCGGGGGGACCGTCAGTCTTCCTCTTCCCCCCAAAACCCAAGGACACCCTCATGATCTCCC
GGACCCCTGAGGTCACATGCGTGGTGGTGGACGTGAGCCACGAAGACCCTGAGGTCAAGTTCAACTGGTACGTGGAC
GGCGTGGAGGTGCATAATGCCAAGACAAAGCCGCGGGAGGAGCAGTACAACAGCACGTACCGTGTGGTCAGCGTCCT
CACCGTCCTGCACCAGGACTGGCTGAATGGCAAGGAGTACAAGTGCGCGGTCTCCAACAAAGCCCTCCCAGCCCCCA
TCGAGAAAACCATCTCCAAAGCCAAAGGGCAGCCCCGAGAACCACAGGTGTATACCCTGCCCCCATCCCGGGATGAG
CTGACCAAGAACCAGGTCAGCCTGTCCTGCGCCGTCAAAGGCTTCTATCCCAGCGACATCGCCGTGGAGTGGGAGAG
CAATGGGCAGCCGGAGAACAACTACAAGACCACGCCTCCCGTGCTGGACTCCGACGGCTCCTTCTTCCTCGTGAGCA
AGCTCACCGTGGACAAGAGCAGGTGGCAGCAGGGGAACGTCTTCTCATGCTCCGTGATGCATGAGGCTCTGCACAAC
CACTACACGCAGAAGAGCCTCTCCCTGTCTCCGGGTGGCGGCGGCGGTTCAGGTGGTGGGGGATCCGACGTTGTGAT
GACGCAGTCTCCTAGTTCAGTATCAGCGTCTGTTGGGGATCGAGTCACGATTACATGCCAGGCGAGCCAAAATATTA
GGACGTATCTGTCTTGGTATCAACAAAAGCCTGGTAAGGCTCCAAAACTCCTCATTTACGCCGCTGCCAACTTGGCT
AGTGGAGTACCTTCACGCTTTAGTGGGTCAGGTTCTGGAACAGATTTTACGTTGACGATCTCCGATTTGGAACCAGG
GGACGCTGCCACGTATTATTGCCAGTCCACCTACCTCGGGACTGACTACGTTGGTGGGGCGTTTGGCGGAGGAACAA
AACTCACTGTACTTGGTGGTGGTGGTTCAGGCGGGGGGGGTTCCGGCGGAGGCGGTTCTGGGGGTGGAGGTTCCGAG
GTTCAGTTGGTTGAAAGTGGGGGGGGACTCGTTCAGCCTGGAGGCTCTTTGCGACTTTCTTGTACCGCTTCTGGGTT
CACTATAAGTTCATATCATATGCAATGGGTAAGACAGGCGCCTGGTAAGGGACTTGAATACATAGGAACAATAAGCT
CTGGTGGTAACGTCTATTACGCCTCATCCGCGCGGGGGAGGTTTACAATTTCCAGGCCTTCTAGCAAAAACACGGTA
GATCTGCAAATGAACTCTCTTCGCGCTGAAGATACAGCAGTCTACTACTGCGCCAGGGATTCAGGGTATTCTGACCC
CATGTGGGGGCAGGGCACATTGGTTACCGTGTCCTCTTGA
>Sequence ID 35: SI-75E1 Chain B Amino Acid Sequence
QSALTQPASVSGSPGQSITISCTGTSSDVGGYNFVSWYQQHPGKAPKLMIYDVSDRPSGVSDRFSGSKSGNTASLII
SGLQADDEADYYCSSYGSSSTHVIFGGGTKVTVLGGGGSGGGGSGGGGSGGGGSQVQLQESGGGLVKPGGSLSLSCA
ASGFTFSSYWMSWVRQAPGKGLEWVANINRDGSASYYVDSVKGRFTISRDDAKNSLYLQMNSLRAEDTAVYYCARDR
GVGYFDLWGRGTLVTVSSGGGGSGGGGSDVVMTQSPSTLSASVGDRVTINCQASESISSWLAWYQQKPGKAPKLLIY
EASKLASGVPSRFSGSGSGTEFTLTISSLQPDDFATYYCQGYFYFISRTYVNSFGGGTKVEIKRTVAAPSVFIFPPS
DEQLKSGTASVVCLLNNFYPREAKVQWKVDNALQSGNSQESVTEQDSKDSTYSLSSTLTLSKADYEKHKVYACEVTH
QGLSSPVTKSFNRGECGGDKTHTCPPCPAPEAAGGPSVFLFPPKPKDTLMISRTPEVTCVVVDVSHEDPEVKFNWYV
DGVEVHNAKTKPREEQYNSTYRVVSVLTVLHQDWLNGKEYKCAVSNKALPAPIEKTISKAKGQPREPQVYTLPPSRD
ELTKNQVSLWCLVKGFYPSDIAVEWESNGQPENNYKTTPPVLDSDGSFFLYSKLTVDKSRWQQGNVFSCSVMHEALH
NRFTQKSLSLSPG
>Sequence ID 36: SI-75E1 Chain B Nucleotide Sequence
CAGTCTGCCCTGACTCAGCCTGCCTCCGTGTCTGGGTCTCCTGGACAGTCGATCACCATCTCCTGCACTGGAACCAG
CAGTGACGTTGGTGGTTATAACTTTGTCTCCTGGTACCAACAACACCCAGGCAAAGCCCCCAAACTCATGATCTATG
ATGTCAGTGATCGGCCCTCAGGGGTGTCTGATCGCTTCTCCGGCTCCAAGTCTGGCAACACGGCCTCCCTGATCATC
TCTGGCCTCCAGGCTGACGACGAGGCTGATTATTACTGCAGCTCATATGGGAGCAGCAGCACTCATGTGATTTTCGG
CGGAGGGACCAAGGTGACCGTCCTAGGCGGTGGCGGTAGTGGGGGAGGCGGTTCTGGCGGCGGAGGGTCCGGCGGTG
GAGGATCACAGGTGCAATTGCAGGAGTCGGGGGGAGGCCTGGTCAAGCCTGGAGGGTCCCTGAGCCTCTCCTGTGCA
GCCTCTGGATTCACCTTTAGTAGTTATTGGATGAGCTGGGTCCGCCAGGCTCCAGGGAAGGGGCTGGAGTGGGTGGC
CAACATAAACCGCGATGGAAGTGCGAGTTACTATGTGGACTCTGTGAAGGGCCGATTCACCATCTCCAGAGACGACG
CCAAGAACTCACTGTATCTGCAAATGAACAGCCTGAGAGCTGAGGACACGGCTGTGTATTACTGTGCGAGAGATCGT
GGGGTGGGCTACTTCGATCTCTGGGGCCGTGGCACCCTGGTCACCGTCTCGAGCGGCGGTGGAGGGTCCGGCGGTGG
TGGATCAGACGTCGTGATGACCCAGTCTCCTTCCACCCTGTCTGCATCTGTAGGAGACAGAGTCACCATCAATTGCC
AAGCCAGTGAGAGCATTAGCAGTTGGTTAGCCTGGTATCAGCAGAAACCAGGGAAAGCCCCTAAGCTCCTGATCTAT
GAAGCATCCAAACTGGCATCTGGGGTCCCATCAAGGTTCAGCGGCAGTGGATCTGGGACAGAATTCACTCTCACCAT
CAGCAGCCTGCAGCCTGATGATTTTGCAACTTATTACTGCCAAGGCTATTTTTATTTTATTAGTCGTACTTATGTAA
ATTCTTTCGGCGGAGGGACCAAGGTGGAGATCAAACGTACGGTGGCTGCCCCCTCTGTGTTCATCTTCCCACCCAGT
GATGAGCAGCTGAAGAGTGGCACAGCCTCTGTGGTGTGCCTGCTCAACAACTTCTACCCCAGAGAAGCCAAGGTGCA
GTGGAAGGTGGACAATGCCCTGCAGAGTGGCAACAGCCAGGAGAGTGTGACAGAGCAGGACAGCAAGGACAGCACCT
ACAGCCTGTCCTCCACCCTGACCCTGTCCAAGGCTGACTATGAGAAGCACAAGGTGTATGCCTGTGAGGTGACCCAC
CAGGGCCTGAGCAGCCCTGTGACCAAGAGCTTCAACCGAGGAGAGTGTGGAGGAGACAAGACCCACACCTGCCCTCC
CTGCCCAGCCCCAGAAGCTGCTGGAGGCCCCTCTGTGTTCCTCTTCCCTCCCAAGCCCAAGGACACCCTGATGATCT
CCAGGACCCCAGAAGTCACCTGTGTGGTGGTGGATGTGTCCCATGAAGACCCAGAAGTGAAGTTCAACTGGTATGTG
GATGGAGTGGAAGTGCACAATGCCAAGACCAAGCCCAGAGAAGAGCAGTACAACAGCACCTACCGAGTGGTGTCTGT
GCTGACTGTGCTGCACCAGGACTGGCTGAATGGGAAGGAGTACAAGTGTGCTGTGTCCAACAAGGCCCTGCCTGCCC
CCATTGAGAAGACCATCTCCAAGGCCAAGGGCCAGCCCAGAGAGCCCCAGGTCTACACCCTGCCTCCCTCCAGAGAT
GAGCTGACCAAGAACCAGGTGTCCCTGTGGTGCCTGGTGAAAGGCTTCTACCCCAGTGACATTGCTGTGGAGTGGGA
GAGCAATGGCCAGCCAGAGAACAACTACAAGACCACCCCTCCTGTGCTGGACTCTGATGGCTCCTTCTTCCTGTACA
GCAAGCTGACTGTGGACAAGAGCCGCTGGCAGCAGGGCAATGTGTTCTCCTGCTCTGTCATGCATGAGGCCCTGCAC
AACCGCTTCACCCAGAAGAGCCTGAGCCTGAGCCCTGGATGA
>Sequence ID 37: SI-75E2 Chain A Amino Acid Sequence
EIVLTQSPSTLSVSPGERATFSCRASQSIGTNIHWYQQKPGKPPRLLIKYASESISGIPDRFSGSGSGTEFTLTISS
VQSEDFAVYYCQQNNNWPTTFGPGTKLTVLGGGGSGGGGSGGGGSGGGGSQVQLQQSGPGLVKPSETLSITCTVSGF
SLTNYGVHWIRQAPGKGLEWLGVIWSGGNTDYNTPFTSRFTITKDNSKNQVYFKLRSVRADDTAIYYCARALTYYDY
EFAYWGQGTLVTVSSGGGGSGGGGSEVQLVESGGGLVQPGGSLRLSCAASGFTISTNAMSWVRQAPGKGLEWIGVIT
GRDITYYASWAKGRFTISRDNSKNTLYLQMNSLRAEDTAVYYCARDGGSSAITSNNIWGQGTLVTVSSASTKGPSVF
PLAPSSKSTSGGTAALGCLVKDYFPEPVTVSWNSGALTSGVHTFPAVLQSSGLYSLSSVVTVPSSSLGTQTYICNVN
HKPSNTKVDKRVEPKSCDKTHTCPPCPAPEAAGGPSVFLFPPKPKDTLMISRTPEVTCVVVDVSHEDPEVKFNWYVD
GVEVHNAKTKPREEQYNSTYRVVSVLTVLHQDWLNGKEYKCAVSNKALPAPIEKTISKAKGQPREPQVYTLPPSRDE
LTKNQVSLSCAVKGFYPSDIAVEWESNGQPENNYKTTPPVLDSDGSFFLVSKLTVDKSRWQQGNVFSCSVMHEALHN
HYTQKSLSLSPG
>Sequence ID 38: SI-75E2 Chain A Nucleotide Sequence
GAAATCGTCCTTACACAATCTCCTAGCACACTGAGTGTGAGCCCCGGCGAACGCGCGACTTTCTCTTGCAGGGCAAG
TCAATCCATAGGGACTAATATACATTGGTATCAACAAAAGCCAGGTAAACCACCCAGGCTTTTGATTAAGTATGCAA
GTGAGTCTATTTCCGGTATCCCTGACCGCTTCTCTGGATCAGGCAGTGGCACAGAGTTCACACTCACCATATCTAGT
GTGCAATCAGAGGACTTCGCCGTGTATTACTGCCAACAGAATAATAACTGGCCGACTACCTTCGGACCCGGTACAAA
GCTGACCGTTTTAGGCGGTGGCGGTAGTGGGGGAGGCGGTTCTGGCGGCGGAGGGTCCGGCGGTGGAGGATCACAAG
TACAGTTGCAGCAATCCGGTCCCGGTCTCGTCAAACCGAGTGAGACGCTTAGTATAACGTGTACTGTTTCAGGCTTT
AGCCTTACGAACTATGGAGTTCACTGGATTCGGCAGGCACCCGGCAAAGGTTTGGAATGGCTGGGTGTTATTTGGTC
AGGTGGAAATACAGACTATAACACCCCCTTTACAAGTCGGTTCACAATTACGAAAGATAATTCCAAAAATCAAGTTT
ATTTCAAGTTGAGATCCGTCCGCGCGGACGACACTGCGATCTACTATTGTGCGAGGGCACTGACCTACTACGATTAC
GAATTTGCGTATTGGGGGCAAGGGACTCTTGTAACAGTCTCGAGCGGCGGTGGAGGGTCCGGCGGTGGTGGATCAGA
GGTGCAGCTGGTGGAGTCTGGGGGAGGCTTGGTCCAGCCTGGGGGGTCCCTGAGACTCTCCTGTGCAGCCTCTGGAT
TCACCATCAGTACCAATGCAATGAGCTGGGTCCGCCAGGCTCCAGGGAAGGGGCTGGAGTGGATCGGAGTCATTACT
GGTCGTGATATCACATACTACGCGAGCTGGGCGAAAGGCAGATTCACCATCTCCAGAGACAATTCCAAGAACACGCT
GTATCTTCAAATGAACAGCCTGAGAGCCGAGGACACGGCTGTGTATTACTGTGCGAGAGACGGTGGTTCTTCTGCTA
TTACTAGTAACAACATTTGGGGCCAGGGAACCCTGGTCACCGTGTCCTCAGCTAGCACCAAAGGCCCCTCTGTGTTC
CCTCTGGCCCCCTCCTCCAAGAGCACCTCTGGAGGCACTGCTGCCCTGGGCTGCCTGGTGAAGGACTACTTCCCAGA
GCCTGTGACTGTGTCCTGGAACTCTGGAGCCCTGACCTCTGGAGTGCACACCTTCCCTGCTGTGCTGCAGAGCTCTG
GCCTCTACAGCCTGTCCTCTGTGGTCACTGTGCCCTCCTCCAGCCTGGGCACCCAGACCTACATCTGCAATGTGAAC
CACAAGCCCTCCAACACCAAGGTGGACAAGAGAGTGGAGCCCAAGTCCTGTGACAAGACCCACACCTGCCCTCCCTG
CCCAGCCCCAGAGGCTGCTGGAGGCCCCTCTGTGTTCCTCTTCCCTCCCAAGCCCAAGGACACCCTGATGATCTCCA
GGACCCCAGAAGTCACCTGTGTGGTGGTGGATGTGTCCCATGAAGACCCAGAAGTGAAGTTCAACTGGTATGTGGAT
GGAGTGGAGGTGCACAATGCCAAGACCAAGCCCAGAGAAGAGCAGTACAACTCCACCTACCGAGTGGTGTCTGTGCT
GACTGTGCTGCACCAGGACTGGCTGAATGGGAAGGAGTACAAGTGTGCTGTGTCCAACAAGGCCCTGCCTGCCCCCA
TTGAGAAGACCATCTCCAAGGCCAAGGGCCAGCCCAGAGAGCCCCAGGTCTACACCCTGCCTCCCTCCAGAGATGAG
CTGACCAAGAACCAGGTGTCCCTGTCCTGTGCTGTGAAAGGCTTCTACCCCAGTGACATTGCTGTGGAGTGGGAGAG
CAATGGCCAGCCAGAGAACAACTACAAGACCACCCCTCCTGTGCTGGACTCTGATGGCTCCTTCTTCCTGGTCTCCA
AGCTGACTGTGGACAAGAGCCGCTGGCAGCAGGGCAATGTGTTCTCCTGCTCTGTCATGCATGAGGCCCTGCACAAC
CACTACACCCAGAAGAGCCTGAGCCTGAGCCCTGGATGA
>Sequence ID 39: SI-75E2 Chain B Amino Acid Sequence
QSALTQPASVSGSPGQSITISCTGTSSDVGGYNFVSWYQQHPGKAPKLMIYDVSDRPSGVSDRFSGSKSGNTASLII
SGLQADDEADYYCSSYGSSSTHVIFGGGTKVTVLGGGGSGGGGSGGGGSGGGGSQVQLQESGGGLVKPGGSLSLSCA
ASGFTFSSYWMSWVRQAPGKGLEWVANINRDGSASYYVDSVKGRFTISRDDAKNSLYLQMNSLRAEDTAVYYCARDR
GVGYFDLWGRGTLVTVSSGGGGSGGGGSDVVMTQSPSTLSASVGDRVTINCQASESISSWLAWYQQKPGKAPKLLIY
EASKLASGVPSRFSGSGSGTEFTLTISSLQPDDFATYYCQGYFYFISRTYVNSFGGGTKVEIKRTVAAPSVFIFPPS
DEQLKSGTASVVCLLNNFYPREAKVQWKVDNALQSGNSQESVTEQDSKDSTYSLSSTLTLSKADYEKHKVYACEVTH
QGLSSPVTKSFNRGECGGDKTHTCPPCPAPEAAGGPSVFLFPPKPKDTLMISRTPEVTCVVVDVSHEDPEVKFNWYV
DGVEVHNAKTKPREEQYNSTYRVVSVLTVLHQDWLNGKEYKCAVSNKALPAPIEKTISKAKGQPREPQVYTLPPSRD
ELTKNQVSLWCLVKGFYPSDIAVEWESNGQPENNYKTTPPVLDSDGSFFLYSKLTVDKSRWQQGNVFSCSVMHEALH
NRFTQKSLSLSPGGGGGSGGGGSDIQMTQSPSTLSASVGDRVTITCQASQSISSHLNWYQQKPGKAPKLLIYKASTL
ASGVPSRFSGSGSGTEFTLTISSLQPDDFATYYCQQGYSWGNVDNVFGGGTKVTVLGGGGSGGGGSGGGGSGGGGSE
VQLLESGGGLVQPGGSLSLSCAASGFSFSSGYDMCWVRQAPGKGLEWIACIAAGSAGITYDANWAKGRFTISRDNSK
NTLYLQMNSLRAEDTAVYYCARSAFSFDYAMDLWGQGTLVTVSS
>Sequence ID 40: SI-75E2 Chain B Nucleotide Sequence
CAGTCTGCCCTGACTCAGCCTGCCTCCGTGTCTGGGTCTCCTGGACAGTCGATCACCATCTCCTGCACTGGAACCAG
CAGTGACGTTGGTGGTTATAACTTTGTCTCCTGGTACCAACAACACCCAGGCAAAGCCCCCAAACTCATGATCTATG
ATGTCAGTGATCGGCCCTCAGGGGTGTCTGATCGCTTCTCCGGCTCCAAGTCTGGCAACACGGCCTCCCTGATCATC
TCTGGCCTCCAGGCTGACGACGAGGCTGATTATTACTGCAGCTCATATGGGAGCAGCAGCACTCATGTGATTTTCGG
CGGAGGGACCAAGGTGACCGTCCTAGGCGGTGGCGGTAGTGGGGGAGGCGGTTCTGGCGGCGGAGGGTCCGGCGGTG
GAGGATCACAGGTGCAATTGCAGGAGTCGGGGGGAGGCCTGGTCAAGCCTGGAGGGTCCCTGAGCCTCTCCTGTGCA
GCCTCTGGATTCACCTTTAGTAGTTATTGGATGAGCTGGGTCCGCCAGGCTCCAGGGAAGGGGCTGGAGTGGGTGGC
CAACATAAACCGCGATGGAAGTGCGAGTTACTATGTGGACTCTGTGAAGGGCCGATTCACCATCTCCAGAGACGACG
CCAAGAACTCACTGTATCTGCAAATGAACAGCCTGAGAGCTGAGGACACGGCTGTGTATTACTGTGCGAGAGATCGT
GGGGTGGGCTACTTCGATCTCTGGGGCCGTGGCACCCTGGTCACCGTCTCGAGCGGCGGTGGAGGGTCCGGCGGTGG
TGGATCAGACGTCGTGATGACCCAGTCTCCTTCCACCCTGTCTGCATCTGTAGGAGACAGAGTCACCATCAATTGCC
AAGCCAGTGAGAGCATTAGCAGTTGGTTAGCCTGGTATCAGCAGAAACCAGGGAAAGCCCCTAAGCTCCTGATCTAT
GAAGCATCCAAACTGGCATCTGGGGTCCCATCAAGGTTCAGCGGCAGTGGATCTGGGACAGAATTCACTCTCACCAT
CAGCAGCCTGCAGCCTGATGATTTTGCAACTTATTACTGCCAAGGCTATTTTTATTTTATTAGTCGTACTTATGTAA
ATTCTTTCGGCGGAGGGACCAAGGTGGAGATCAAACGTACGGTGGCTGCACCATCTGTCTTCATCTTCCCGCCATCT
GATGAGCAGTTGAAATCTGGAACTGCCTCTGTTGTGTGCCTGCTGAATAACTTCTATCCCAGAGAGGCCAAAGTACA
GTGGAAGGTGGATAACGCCCTCCAATCGGGTAACTCCCAGGAGAGTGTCACAGAGCAGGACAGCAAGGACAGCACCT
ACAGCCTCAGCAGCACCCTGACGCTGAGCAAAGCAGACTACGAGAAACACAAAGTCTACGCCTGCGAAGTCACCCAT
CAGGGCCTGAGCTCGCCCGTCACAAAGAGCTTCAACAGGGGAGAGTGTGGAGGCGACAAAACTCACACATGCCCACC
GTGCCCAGCACCTGAAGCCGCGGGGGGACCGTCAGTCTTCCTCTTCCCCCCAAAACCCAAGGACACCCTCATGATCT
CCCGGACCCCTGAGGTCACATGCGTGGTGGTGGACGTGAGCCACGAAGACCCTGAGGTCAAGTTCAACTGGTACGTG
GACGGCGTGGAGGTGCATAATGCCAAGACAAAGCCGCGGGAGGAGCAGTACAACAGCACGTACCGTGTGGTCAGCGT
CCTCACCGTCCTGCACCAGGACTGGCTGAATGGCAAGGAGTACAAGTGCGCGGTCTCCAACAAAGCCCTCCCAGCCC
CCATCGAGAAAACCATCTCCAAAGCCAAAGGGCAGCCCCGAGAACCACAGGTGTACACCCTGCCCCCAAGCCGGGAT
GAGCTGACCAAGAACCAGGTCAGCCTGTGGTGCCTGGTCAAAGGCTTCTATCCCAGCGACATCGCCGTGGAGTGGGA
GAGCAATGGGCAGCCGGAGAACAACTACAAGACCACGCCTCCCGTGCTGGACTCCGACGGCTCCTTCTTCCTCTATA
GCAAGCTCACCGTGGACAAGAGCAGGTGGCAGCAGGGGAACGTCTTCTCATGCTCCGTGATGCATGAGGCTCTGCAC
AACAGATTCACGCAGAAGAGCCTCTCCCTGTCTCCGGGTGGCGGTGGAGGGTCCGGCGGTGGTGGATCCGACATTCA
GATGACACAGTCACCGTCTACGCTCTCAGCCTCAGTAGGCGATAGGGTGACTATCACCTGCCAAGCCTCCCAATCTA
TAAGTTCACACCTCAACTGGTATCAACAGAAACCCGGTAAAGCACCGAAGCTGCTCATCTACAAGGCATCAACTCTT
GCCTCAGGTGTGCCTAGTCGCTTCTCCGGGAGCGGCTCCGGTACTGAGTTTACTTTGACGATATCTTCCCTCCAACC
CGACGACTTCGCCACATACTATTGTCAGCAGGGTTATAGTTGGGGAAATGTTGACAATGTGTTTGGAGGGGGAACGA
AAGTGACTGTGTTGGGAGGGGGAGGAAGTGGCGGCGGCGGAAGCGGAGGTGGTGGCTCCGGCGGGGGTGGAAGCGAA
GTGCAATTGCTCGAAAGTGGTGGCGGACTTGTGCAACCTGGTGGAAGCCTCTCACTCTCTTGCGCGGCGAGTGGTTT
TAGCTTCAGTAGCGGCTACGATATGTGCTGGGTAAGACAGGCTCCTGGTAAAGGCCTTGAGTGGATTGCGTGTATCG
CCGCCGGGTCTGCTGGTATAACATACGATGCAAACTGGGCGAAAGGGCGCTTCACAATCTCCAGGGACAACTCAAAA
AATACATTGTACCTCCAGATGAATAGCCTGAGAGCCGAAGACACCGCAGTCTACTATTGCGCAAGGTCAGCATTTAG
CTTCGATTATGCAATGGATCTTTGGGGCCAGGGGACGCTCGTCACCGTCTCATCTTGA
>Sequence ID 41: SI-75x3 Chain A Amino Acid Sequence
EIVLTQSPSTLSVSPGERATFSCRASQSIGTNIHWYQQKPGKPPRLLIKYASESISGIPDRFSGSGSGTEFTLTISS
VQSEDFAVYYCQQNNNWPTTFGPGTKLTVLGGGGSGGGGSGGGGSGGGGSQVQLQQSGPGLVKPSETLSITCTVSGF
SLTNYGVHWIRQAPGKGLEWLGVIWSGGNTDYNTPFTSRFTITKDNSKNQVYFKLRSVRADDTAIYYCARALTYYDY
EFAYWGQGTLVTVSSGGGGSGGGGSEVQLVESGGGLVQPGGSLRLSCAASGFTISTNAMSWVRQAPGKGLEWIGVIT
GRDITYYASWAKGRETISRDNSKNTLYLQMNSLRAEDTAVYYCARDGGSSAITSNNIWGQGTLVTVSSASTKGPSVF
PLAPSSKSTSGGTAALGCLVKDYFPEPVTVSWNSGALTSGVHTFPAVLQSSGLYSLSSVVTVPSSSLGTQTYICNVN
HKPSNTKVDKRVEPKSCDKTHTCPPCPAPEAAGGPSVFLFPPKPKDTLMISRTPEVTCVVVDVSHEDPEVKFNWYVD
GVEVHNAKTKPREEQYNSTYRVVSVLTVLHQDWLNGKEYKCAVSNKALPAPIEKTISKAKGQPREPQVYTLPPSRDE
LTKNQVSLSCAVKGFYPSDIAVEWESNGQPENNYKTTPPVLDSDGSFFLVSKLTVDKSRWQQGNVFSCSVMHEALHN
HYTQKSLSLSPG
>Sequence ID 42: SI-75X3 Chain A Nucleotide Sequence
GAAATCGTCCTTACACAATCTCCTAGCACACTGAGTGTGAGCCCCGGCGAACGCGCGACTTTCTCTTGCAGGGCAAG
TCAATCCATAGGGACTAATATACATTGGTATCAACAAAAGCCAGGTAAACCACCCAGGCTTTTGATTAAGTATGCAA
GTGAGTCTATTTCCGGTATCCCTGACCGCTTCTCTGGATCAGGCAGTGGCACAGAGTTCACACTCACCATATCTAGT
GTGCAATCAGAGGACTTCGCCGTGTATTACTGCCAACAGAATAATAACTGGCCGACTACCTTCGGACCCGGTACAAA
GCTGACCGTTTTAGGCGGTGGCGGTAGTGGGGGAGGCGGTTCTGGCGGCGGAGGGTCCGGCGGTGGAGGATCACAAG
TACAGTTGCAGCAATCCGGTCCCGGTCTCGTCAAACCGAGTGAGACGCTTAGTATAACGTGTACTGTTTCAGGCTTT
AGCCTTACGAACTATGGAGTTCACTGGATTCGGCAGGCACCCGGCAAAGGTTTGGAATGGCTGGGTGTTATTTGGTC
AGGTGGAAATACAGACTATAACACCCCCTTTACAAGTCGGTTCACAATTACGAAAGATAATTCCAAAAATCAAGTTT
ATTTCAAGTTGAGATCCGTCCGCGCGGACGACACTGCGATCTACTATTGTGCGAGGGCACTGACCTACTACGATTAC
GAATTTGCGTATTGGGGGCAAGGGACTCTTGTAACAGTCTCGAGCGGCGGTGGAGGGTCCGGCGGTGGTGGATCAGA
GGTGCAGCTGGTGGAGTCTGGGGGAGGCTTGGTCCAGCCTGGGGGGTCCCTGAGACTCTCCTGTGCAGCCTCTGGAT
TCACCATCAGTACCAATGCAATGAGCTGGGTCCGCCAGGCTCCAGGGAAGGGGCTGGAGTGGATCGGAGTCATTACT
GGTCGTGATATCACATACTACGCGAGCTGGGCGAAAGGCAGATTCACCATCTCCAGAGACAATTCCAAGAACACGCT
GTATCTTCAAATGAACAGCCTGAGAGCCGAGGACACGGCTGTGTATTACTGTGCGAGAGACGGTGGTTCTTCTGCTA
TTACTAGTAACAACATTTGGGGCCAGGGAACCCTGGTCACCGTGTCCTCAGCTAGCACCAAAGGCCCCTCTGTGTTC
CCTCTGGCCCCCTCCTCCAAGAGCACCTCTGGAGGCACTGCTGCCCTGGGCTGCCTGGTGAAGGACTACTTCCCAGA
GCCTGTGACTGTGTCCTGGAACTCTGGAGCCCTGACCTCTGGAGTGCACACCTTCCCTGCTGTGCTGCAGAGCTCTG
GCCTCTACAGCCTGTCCTCTGTGGTCACTGTGCCCTCCTCCAGCCTGGGCACCCAGACCTACATCTGCAATGTGAAC
CACAAGCCCTCCAACACCAAGGTGGACAAGAGAGTGGAGCCCAAGTCCTGTGACAAGACCCACACCTGCCCTCCCTG
CCCAGCCCCAGAGGCTGCTGGAGGCCCCTCTGTGTTCCTCTTCCCTCCCAAGCCCAAGGACACCCTGATGATCTCCA
GGACCCCAGAAGTCACCTGTGTGGTGGTGGATGTGTCCCATGAAGACCCAGAAGTGAAGTTCAACTGGTATGTGGAT
GGAGTGGAGGTGCACAATGCCAAGACCAAGCCCAGAGAAGAGCAGTACAACTCCACCTACCGAGTGGTGTCTGTGCT
GACTGTGCTGCACCAGGACTGGCTGAATGGGAAGGAGTACAAGTGTGCTGTGTCCAACAAGGCCCTGCCTGCCCCCA
TTGAGAAGACCATCTCCAAGGCCAAGGGCCAGCCCAGAGAGCCCCAGGTCTACACCCTGCCTCCCTCCAGAGATGAG
CTGACCAAGAACCAGGTGTCCCTGTCCTGTGCTGTGAAAGGCTTCTACCCCAGTGACATTGCTGTGGAGTGGGAGAG
CAATGGCCAGCCAGAGAACAACTACAAGACCACCCCTCCTGTGCTGGACTCTGATGGCTCCTTCTTCCTGGTCTCCA
AGCTGACTGTGGACAAGAGCCGCTGGCAGCAGGGCAATGTGTTCTCCTGCTCTGTCATGCATGAGGCCCTGCACAAC
CACTACACCCAGAAGAGCCTGAGCCTGAGCCCTGGATGA
>Sequence ID 43: SI-75X3 Chain B Amino Acid Sequence
QSALTQPASVSGSPGQSITISCTGTSSDVGGYNFVSWYQQHPGKAPKLMIYDVSDRPSGVSDRFSGSKSGNTASLII
SGLQADDEADYYCSSYGSSSTHVIFGGGTKVTVLGGGGSGGGGSGGGGSGGGGSQVQLQESGGGLVKPGGSLSLSCA
ASGFTFSSYWMSWVRQAPGKGLEWVANINRDGSASYYVDSVKGRFTISRDDAKNSLYLQMNSLRAEDTAVYYCARDR
GVGYFDLWGRGTLVTVSSGGGGSGGGGSDVVMTQSPSTLSASVGDRVTINCQASESISSWLAWYQQKPGKAPKLLIY
EASKLASGVPSRFSGSGSGTEFTLTISSLQPDDFATYYCQGYFYFISRTYVNSFGGGTKVEIKRTVAAPSVFIFPPS
DEQLKSGTASVVCLLNNFYPREAKVQWKVDNALQSGNSQESVTEQDSKDSTYSLSSTLTLSKADYEKHKVYACEVTH
QGLSSPVTKSFNRGECGGDKTHTCPPCPAPEAAGGPSVFLFPPKPKDTLMISRTPEVTCVVVDVSHEDPEVKFNWYV
DGVEVHNAKTKPREEQYNSTYRVVSVLTVLHQDWLNGKEYKCAVSNKALPAPIEKTISKAKGQPREPQVYTLPPSRD
ELTKNQVSLWCLVKGFYPSDIAVEWESNGQPENNYKTTPPVLDSDGSFFLYSKLTVDKSRWQQGNVFSCSVMHEALH
NRFTQKSLSLSPG
>Sequence ID 44: SI-75X3 Chain B Nucleotide Sequence
CAGTCTGCCCTGACTCAGCCTGCCTCCGTGTCTGGGTCTCCTGGACAGTCGATCACCATCTCCTGCACTGGAACCAG
CAGTGACGTTGGTGGTTATAACTTTGTCTCCTGGTACCAACAACACCCAGGCAAAGCCCCCAAACTCATGATCTATG
ATGTCAGTGATCGGCCCTCAGGGGTGTCTGATCGCTTCTCCGGCTCCAAGTCTGGCAACACGGCCTCCCTGATCATC
TCTGGCCTCCAGGCTGACGACGAGGCTGATTATTACTGCAGCTCATATGGGAGCAGCAGCACTCATGTGATTTTCGG
CGGAGGGACCAAGGTGACCGTCCTAGGCGGTGGCGGTAGTGGGGGAGGCGGTTCTGGCGGCGGAGGGTCCGGCGGTG
GAGGATCACAGGTGCAATTGCAGGAGTCGGGGGGAGGCCTGGTCAAGCCTGGAGGGTCCCTGAGCCTCTCCTGTGCA
GCCTCTGGATTCACCTTTAGTAGTTATTGGATGAGCTGGGTCCGCCAGGCTCCAGGGAAGGGGCTGGAGTGGGTGGC
CAACATAAACCGCGATGGAAGTGCGAGTTACTATGTGGACTCTGTGAAGGGCCGATTCACCATCTCCAGAGACGACG
CCAAGAACTCACTGTATCTGCAAATGAACAGCCTGAGAGCTGAGGACACGGCTGTGTATTACTGTGCGAGAGATCGT
GGGGTGGGCTACTTCGATCTCTGGGGCCGTGGCACCCTGGTCACCGTCTCGAGCGGCGGTGGAGGGTCCGGCGGTGG
TGGATCAGACGTCGTGATGACCCAGTCTCCTTCCACCCTGTCTGCATCTGTAGGAGACAGAGTCACCATCAATTGCC
AAGCCAGTGAGAGCATTAGCAGTTGGTTAGCCTGGTATCAGCAGAAACCAGGGAAAGCCCCTAAGCTCCTGATCTAT
GAAGCATCCAAACTGGCATCTGGGGTCCCATCAAGGTTCAGCGGCAGTGGATCTGGGACAGAATTCACTCTCACCAT
CAGCAGCCTGCAGCCTGATGATTTTGCAACTTATTACTGCCAAGGCTATTTTTATTTTATTAGTCGTACTTATGTAA
ATTCTTTCGGCGGAGGGACCAAGGTGGAGATCAAACGTACGGTGGCTGCCCCCTCTGTGTTCATCTTCCCACCCAGT
GATGAGCAGCTGAAGAGTGGCACAGCCTCTGTGGTGTGCCTGCTCAACAACTTCTACCCCAGAGAAGCCAAGGTGCA
GTGGAAGGTGGACAATGCCCTGCAGAGTGGCAACAGCCAGGAGAGTGTGACAGAGCAGGACAGCAAGGACAGCACCT
ACAGCCTGTCCTCCACCCTGACCCTGTCCAAGGCTGACTATGAGAAGCACAAGGTGTATGCCTGTGAGGTGACCCAC
CAGGGCCTGAGCAGCCCTGTGACCAAGAGCTTCAACCGAGGAGAGTGTGGAGGAGACAAGACCCACACCTGCCCTCC
CTGCCCAGCCCCAGAAGCTGCTGGAGGCCCCTCTGTGTTCCTCTTCCCTCCCAAGCCCAAGGACACCCTGATGATCT
CCAGGACCCCAGAAGTCACCTGTGTGGTGGTGGATGTGTCCCATGAAGACCCAGAAGTGAAGTTCAACTGGTATGTG
GATGGAGTGGAAGTGCACAATGCCAAGACCAAGCCCAGAGAAGAGCAGTACAACAGCACCTACCGAGTGGTGTCTGT
GCTGACTGTGCTGCACCAGGACTGGCTGAATGGGAAGGAGTACAAGTGTGCTGTGTCCAACAAGGCCCTGCCTGCCC
CCATTGAGAAGACCATCTCCAAGGCCAAGGGCCAGCCCAGAGAGCCCCAGGTCTACACCCTGCCTCCCTCCAGAGAT
GAGCTGACCAAGAACCAGGTGTCCCTGTGGTGCCTGGTGAAAGGCTTCTACCCCAGTGACATTGCTGTGGAGTGGGA
GAGCAATGGCCAGCCAGAGAACAACTACAAGACCACCCCTCCTGTGCTGGACTCTGATGGCTCCTTCTTCCTGTACA
GCAAGCTGACTGTGGACAAGAGCCGCTGGCAGCAGGGCAATGTGTTCTCCTGCTCTGTCATGCATGAGGCCCTGCAC
AACCGCTTCACCCAGAAGAGCCTGAGCCTGAGCCCTGGATGA
>Sequence ID 45: SI-75X16 Chain A Amino Acid Sequence
EIVLTQSPSTLSVSPGERATFSCRASQSIGTNIHWYQQKPGKPPRLLIKYASESISGIPDRFSGSGSGTEFTLTISS
VQSEDFAVYYCQQNNNWPTTFGPGTKLTVLGGGGSGGGGSGGGGSGGGGSQVQLQQSGPGLVKPSETLSITCTVSGF
SLTNYGVHWIRQAPGKGLEWLGVIWSGGNTDYNTPFTSRFTITKDNSKNQVYFKLRSVRADDTAIYYCARALTYYDY
EFAYWGQGTLVTVSSGGGGSGGGGSQVQLQESGGRLVQPGEPLSLTCKTSGIDLSSNAIGWVRQAPGKGLEWIGVIF
GSGNTYYASWAKGRFTISRSTSTVYLKMNSLRSEDTAIYYCARGGYSSDIWGQGTLVTVSSASTKGPSVFPLAPSSK
STSGGTAALGCLVKDYFPEPVTVSWNSGALTSGVHTFPAVLQSSGLYSLSSVVTVPSSSLGTQTYICNVNHKPSNTK
VDKRVEPKSCDKTHTCPPCPAPEAAGGPSVFLFPPKPKDTLMISRTPEVTCVVVDVSHEDPEVKFNWYVDGVEVHNA
KTKPREEQYNSTYRVVSVLTVLHQDWLNGKEYKCAVSNKALPAPIEKTISKAKGQPREPQVYTLPPSRDELTKNQVS
LSCAVKGFYPSDIAVEWESNGQPENNYKTTPPVLDSDGSFFLVSKLTVDKSRWQQGNVFSCSVMHEALHNHYTQKSL
SLSPG
>Sequence ID 46: SI-75X16 Chain A Nucleotide Sequence
GAGATCGTGCTGACCCAGTCTCCTTCCACACTGTCTGTGTCTCCCGGCGAGAGAGCCACCTTCAGCTGTAGAGCCTC
TCAGTCCATCGGCACCAACATCCACTGGTATCAGCAGAAGCCCGGCAAGCCTCCTCGGCTGCTGATTAAGTACGCCT
CCGAGTCCATCAGCGGCATCCCTGACAGATTCTCCGGCTCTGGCTCTGGCACCGAGTTTACCCTGACCATCTCCTCC
GTGCAGTCCGAGGATTTCGCCGTGTACTACTGCCAGCAGAACAACAACTGGCCCACCACCTTTGGACCCGGCACCAA
GCTGACAGTTCTTGGCGGCGGAGGATCTGGCGGAGGTGGAAGCGGAGGCGGAGGAAGCGGTGGCGGCGGATCTCAAG
TTCAGTTGCAGCAGTCTGGCCCTGGCCTGGTCAAGCCTTCTGAGACACTGTCCATCACCTGTACCGTGTCCGGCTTC
TCCCTGACCAATTACGGCGTGCACTGGATCAGACAGGCCCCTGGCAAAGGACTGGAATGGCTGGGAGTGATTTGGAG
CGGCGGCAACACCGACTACAACACCCCTTTCACCAGCCGGTTCACCATCACCAAGGACAACTCCAAGAACCAGGTGT
ACTTCAAGCTGCGGAGCGTGCGGGCTGATGACACCGCCATCTACTACTGTGCTCGGGCCCTGACCTACTACGACTAC
GAGTTTGCTTACTGGGGCCAGGGCACCCTGGTCACAGTCTCGAGCGGCGGTGGAGGGTCCGGCGGTGGTGGATCACA
AGTGCAGTTGCAAGAAAGTGGTGGTAGACTGGTTCAGCCTGGTGAACCCTTGTCACTGACGTGTAAAACAAGCGGCA
TTGATCTGTCCTCTAACGCCATCGGATGGGTCCGACAGGCCCCAGGAAAAGGTCTGGAGTGGATCGGAGTTATCTTC
GGGAGCGGCAATACATACTACGCAAGCTGGGCAAAAGGGCGATTTACGATATCACGGAGCACCTCTACAGTTTATTT
GAAAATGAACTCCCTCCGGTCCGAGGATACCGCGATATATTACTGTGCCAGAGGGGGGTACTCCTCTGATATCTGGG
GGCAGGGTACACTGGTTACAGTTTCATCCGCTAGCACCAAAGGCCCCTCTGTGTTCCCTCTGGCCCCCTCCTCCAAG
AGCACCTCTGGAGGCACTGCTGCCCTGGGCTGCCTGGTGAAGGACTACTTCCCAGAGCCTGTGACTGTGTCCTGGAA
CTCTGGAGCCCTGACCTCTGGAGTGCACACCTTCCCTGCTGTGCTGCAGAGCTCTGGCCTCTACAGCCTGTCCTCTG
TGGTCACTGTGCCCTCCTCCAGCCTGGGCACCCAGACCTACATCTGCAATGTGAACCACAAGCCCTCCAACACCAAG
GTGGACAAGAGAGTGGAGCCCAAGTCCTGTGACAAGACCCACACCTGCCCTCCCTGCCCAGCCCCAGAGGCTGCTGG
AGGCCCCTCTGTGTTCCTCTTCCCTCCCAAGCCCAAGGACACCCTGATGATCTCCAGGACCCCAGAAGTCACCTGTG
TGGTGGTGGATGTGTCCCATGAAGACCCAGAAGTGAAGTTCAACTGGTATGTGGATGGAGTGGAGGTGCACAATGCC
AAGACCAAGCCCAGAGAAGAGCAGTACAACTCCACCTACCGAGTGGTGTCTGTGCTGACTGTGCTGCACCAGGACTG
GCTGAATGGGAAGGAGTACAAGTGTGCTGTGTCCAACAAGGCCCTGCCTGCCCCCATTGAGAAGACCATCTCCAAGG
CCAAGGGCCAGCCCAGAGAGCCCCAGGTCTACACCCTGCCTCCCTCCAGAGATGAGCTGACCAAGAACCAGGTGTCC
CTGTCCTGTGCTGTGAAAGGCTTCTACCCCAGTGACATTGCTGTGGAGTGGGAGAGCAATGGCCAGCCAGAGAACAA
CTACAAGACCACCCCTCCTGTGCTGGACTCTGATGGCTCCTTCTTCCTGGTCTCCAAGCTGACTGTGGACAAGAGCC
GCTGGCAGCAGGGCAATGTGTTCTCCTGCTCTGTCATGCATGAGGCCCTGCACAACCACTACACCCAGAAGAGCCTG
AGCCTGAGCCCTGGATGA
>Sequence ID 47: SI-75X16 Chain B Amino Acid Sequence
QSALTQPASVSGSPGQSITISCTGTSSDVGGYNFVSWYQQHPGKAPKLMIYDVSDRPSGVSDRFSGSKSGNTASLII
SGLQADDEADYYCSSYGSSSTHVIFGGGTKVTVLGGGGSGGGGSGGGGSGGGGSQVQLQESGGGLVKPGGSLSLSCA
ASGFTFSSYWMSWVRQAPGKGLEWVANINRDGSASYYVDSVKGRFTISRDDAKNSLYLQMNSLRAEDTAVYYCARDR
GVGYFDLWGRGTLVTVSSGGGGSGGGGSDPQLTQSPSSLSATVGQRVTINCQSSQSVAKNNNLAWFQQKPGKPPKLL
IYSASTLAAGVPSRFSGSGSGTQFTLTITRVQSEDFATYYCSARDSGNIQSFGGGTRVEIKRTVAAPSVFIFPPSDE
QLKSGTASVVCLLNNFYPREAKVQWKVDNALQSGNSQESVTEQDSKDSTYSLSSTLTLSKADYEKHKVYACEVTHQG
LSSPVTKSFNRGECGGDKTHTCPPCPAPEAAGGPSVFLFPPKPKDTLMISRTPEVTCVVVDVSHEDPEVKFNWYVDG
VEVHNAKTKPREEQYNSTYRVVSVLTVLHQDWLNGKEYKCAVSNKALPAPIEKTISKAKGQPREPQVYTLPPSRDEL
TKNQVSLWCLVKGFYPSDIAVEWESNGQPENNYKTTPPVLDSDGSFFLYSKLTVDKSRWQQGNVFSCSVMHEALHNR
FTQKSLSLSPG
>Sequence ID 48: SI-75X16 Chain B Nucleotide Sequence
CAGTCTGCCCTGACTCAGCCTGCCTCCGTGTCTGGGTCTCCTGGACAGTCGATCACCATCTCCTGCACTGGAACCAG
CAGTGACGTTGGTGGTTATAACTTTGTCTCCTGGTACCAACAACACCCAGGCAAAGCCCCCAAACTCATGATCTATG
ATGTCAGTGATCGGCCCTCAGGGGTGTCTGATCGCTTCTCCGGCTCCAAGTCTGGCAACACGGCCTCCCTGATCATC
TCTGGCCTCCAGGCTGACGACGAGGCTGATTATTACTGCAGCTCATATGGGAGCAGCAGCACTCATGTGATTTTCGG
CGGAGGGACCAAGGTGACCGTCCTAGGCGGTGGCGGTAGTGGGGGAGGCGGTTCTGGCGGCGGAGGGTCCGGCGGTG
GAGGATCACAGGTGCAATTGCAGGAGTCGGGGGGAGGCCTGGTCAAGCCTGGAGGGTCCCTGAGCCTCTCCTGTGCA
GCCTCTGGATTCACCTTTAGTAGTTATTGGATGAGCTGGGTCCGCCAGGCTCCAGGGAAGGGGCTGGAGTGGGTGGC
CAACATAAACCGCGATGGAAGTGCGAGTTACTATGTGGACTCTGTGAAGGGCCGATTCACCATCTCCAGAGACGACG
CCAAGAACTCACTGTATCTGCAAATGAACAGCCTGAGAGCTGAGGACACGGCTGTGTATTACTGTGCGAGAGATCGT
GGGGTGGGCTACTTCGATCTCTGGGGCCGTGGCACCCTGGTCACCGTCTCGAGTGGCGGTGGAGGGTCCGGCGGTGG
TGGATCAGATCCTCAATTGACCCAGTCCCCTAGTAGCCTTTCTGCAACCGTGGGCCAGAGGGTAACAATCAATTGCC
AGTCAAGCCAGTCCGTAGCGAAGAATAATAATTTGGCATGGTTCCAACAAAAACCGGGTAAACCTCCTAAACTCCTT
ATCTACTCAGCTTCAACCCTTGCCGCGGGTGTGCCCAGCCGGTTCTCAGGCTCAGGTTCCGGGACTCAATTTACACT
TACCATCACTCGCGTCCAAAGTGAGGATTTTGCAACCTACTATTGTTCTGCACGGGATTCCGGGAACATACAGTCCT
TTGGGGGTGGAACTCGGGTGGAGATAAAACGTACGGTGGCTGCCCCCTCTGTGTTCATCTTCCCACCCAGTGATGAG
CAGCTGAAGAGTGGCACAGCCTCTGTGGTGTGCCTGCTCAACAACTTCTACCCCAGAGAAGCCAAGGTGCAGTGGAA
GGTGGACAATGCCCTGCAGAGTGGCAACAGCCAGGAGAGTGTGACAGAGCAGGACAGCAAGGACAGCACCTACAGCC
TGTCCTCCACCCTGACCCTGTCCAAGGCTGACTATGAGAAGCACAAGGTGTATGCCTGTGAGGTGACCCACCAGGGC
CTGAGCAGCCCTGTGACCAAGAGCTTCAACCGAGGAGAGTGTGGAGGAGACAAGACCCACACCTGCCCTCCCTGCCC
AGCCCCAGAAGCTGCTGGAGGCCCCTCTGTGTTCCTCTTCCCTCCCAAGCCCAAGGACACCCTGATGATCTCCAGGA
CCCCAGAAGTCACCTGTGTGGTGGTGGATGTGTCCCATGAAGACCCAGAAGTGAAGTTCAACTGGTATGTGGATGGA
GTGGAAGTGCACAATGCCAAGACCAAGCCCAGAGAAGAGCAGTACAACAGCACCTACCGAGTGGTGTCTGTGCTGAC
TGTGCTGCACCAGGACTGGCTGAATGGGAAGGAGTACAAGTGTGCTGTGTCCAACAAGGCCCTGCCTGCCCCCATTG
AGAAGACCATCTCCAAGGCCAAGGGCCAGCCCAGAGAGCCCCAGGTCTACACCCTGCCTCCCTCCAGAGATGAGCTG
ACCAAGAACCAGGTGTCCCTGTGGTGCCTGGTGAAAGGCTTCTACCCCAGTGACATTGCTGTGGAGTGGGAGAGCAA
TGGCCAGCCAGAGAACAACTACAAGACCACCCCTCCTGTGCTGGACTCTGATGGCTCCTTCTTCCTGTACAGCAAGC
TGACTGTGGACAAGAGCCGCTGGCAGCAGGGCAATGTGTTCTCCTGCTCTGTCATGCATGAGGCCCTGCACAACCGC
TTCACCCAGAAGAGCCTGAGCCTGAGCCCTGGA
>Sequence ID 49: SI-75X18 Chain A Amino Acid Sequence
QVQLQESGGRLVQPGEPLSLTCKTSGIDLSSNAIGWVRQAPGKGLEWIGVIFGSGNTYYASWAKGRFTISRSTSTVY
LKMNSLRSEDTAIYYCARGGYSSDIWGQGTLVTVSSASTKGPSVFPLAPSSKSTSGGTAALGCLVKDYFPEPVTVSW
NSGALTSGVHTFPAVLQSSGLYSLSSVVTVPSSSLGTQTYICNVNHKPSNTKVDKRVEPKSCDKTHTCPPCPAPEAA
GGPSVFLFPPKPKDTLMISRTPEVTCVVVDVSHEDPEVKFNWYVDGVEVHNAKTKPREEQYNSTYRVVSVLTVLHQD
WLNGKEYKCAVSNKALPAPIEKTISKAKGQPREPQVYTLPPSRDELTKNQVSLSCAVKGFYPSDIAVEWESNGQPEN
NYKTTPPVLDSDGSFFLVSKLTVDKSRWQQGNVFSCSVMHEALHNHYTQKSLSLSPGGGGGSGGGGSQVQLQQSGPG
LVKPSETLSITCTVSGFSLTNYGVHWIRQAPGKGLEWLGVIWSGGNTDYNTPFTSRFTITKDNSKNQVYFKLRSVRA
DDTAIYYCARALTYYDYEFAYWGQGTLVTVSSGGGGSGGGGSGGGGSGGGGSEIVLTQSPSTLSVSPGERATFSCRA
SQSIGTNIHWYQQKPGKPPRLLIKYASESISGIPDRFSGSGSGTEFTLTISSVQSEDFAVYYCQQNNNWPTTFGPGT
KLTVL
>Sequence ID 50: SI-75X18 Chain A Nucleotide Sequence
CAAGTGCAGTTGCAAGAAAGTGGTGGTAGACTGGTTCAGCCTGGTGAACCCTTGTCACTGACGTGTAAAACAAGCGG
CATTGATCTGTCCTCTAACGCCATCGGATGGGTCCGACAGGCCCCAGGAAAAGGTCTGGAGTGGATCGGAGTTATCT
TCGGGAGCGGCAATACATACTACGCAAGCTGGGCAAAAGGGCGATTTACGATATCACGGAGCACCTCTACAGTTTAT
TTGAAAATGAACTCCCTCCGGTCCGAGGATACCGCGATATATTACTGTGCCAGAGGGGGGTACTCCTCTGATATCTG
GGGGCAGGGTACACTGGTTACAGTTTCATCCGCTAGCACCAAAGGCCCCTCTGTGTTCCCTCTGGCCCCCTCCTCCA
AGAGCACCTCTGGAGGCACTGCTGCCCTGGGCTGCCTGGTGAAGGACTACTTCCCAGAGCCTGTGACTGTGTCCTGG
AACTCTGGAGCCCTGACCTCTGGAGTGCACACCTTCCCTGCTGTGCTGCAGAGCTCTGGCCTCTACAGCCTGTCCTC
TGTGGTCACTGTGCCCTCCTCCAGCCTGGGCACCCAGACCTACATCTGCAATGTGAACCACAAGCCCTCCAACACCA
AGGTGGACAAGAGAGTGGAGCCCAAGTCCTGTGACAAGACCCACACCTGCCCTCCCTGCCCAGCCCCAGAGGCTGCT
GGAGGCCCCTCTGTGTTCCTCTTCCCTCCCAAGCCCAAGGACACCCTGATGATCTCCAGGACCCCAGAAGTCACCTG
TGTGGTGGTGGATGTGTCCCATGAAGACCCAGAAGTGAAGTTCAACTGGTATGTGGATGGAGTGGAGGTGCACAATG
CCAAGACCAAGCCCAGAGAAGAGCAGTACAACTCCACCTACCGAGTGGTGTCTGTGCTGACTGTGCTGCACCAGGAC
TGGCTGAATGGGAAGGAGTACAAGTGTGCTGTGTCCAACAAGGCCCTGCCTGCCCCCATTGAGAAGACCATCTCCAA
GGCCAAGGGCCAGCCCAGAGAGCCCCAGGTCTACACCCTGCCTCCCTCCAGAGATGAGCTGACCAAGAACCAGGTGT
CCCTGTCCTGTGCTGTGAAAGGCTTCTACCCCAGTGACATTGCTGTGGAGTGGGAGAGCAATGGCCAGCCAGAGAAC
AACTACAAGACCACCCCTCCTGTGCTGGACTCTGATGGCTCCTTCTTCCTGGTCTCCAAGCTGACTGTGGACAAGAG
CCGCTGGCAGCAGGGCAATGTGTTCTCCTGCTCTGTCATGCATGAGGCCCTGCACAACCACTACACCCAGAAGAGCC
TGAGCCTGAGCCCTGGAGGAGGAGGAGGCTCTGGAGGAGGAGGATCCCAAGTTCAGTTGCAGCAGTCTGGCCCTGGC
CTGGTCAAGCCTTCTGAGACACTGTCCATCACCTGTACCGTGTCCGGCTTCTCCCTGACCAATTACGGCGTGCACTG
GATCAGACAGGCCCCTGGCAAAGGACTGGAATGGCTGGGAGTGATTTGGAGCGGCGGCAACACCGACTACAACACCC
CTTTCACCAGCCGGTTCACCATCACCAAGGACAACTCCAAGAACCAGGTGTACTTCAAGCTGCGGAGCGTGCGGGCT
GATGACACCGCCATCTACTACTGTGCTCGGGCCCTGACCTACTACGACTACGAGTTTGCTTACTGGGGCCAGGGCAC
CCTGGTCACAGTTTCTTCTGGTGGTGGTGGTTCAGGCGGGGGGGGTTCCGGCGGAGGCGGTTCTGGGGGTGGAGGTT
CCGAGATCGTGCTGACCCAGTCTCCTTCCACACTGTCTGTGTCTCCCGGCGAGAGAGCCACCTTCAGCTGTAGAGCC
TCTCAGTCCATCGGCACCAACATCCACTGGTATCAGCAGAAGCCCGGCAAGCCTCCTCGGCTGCTGATTAAGTACGC
CTCCGAGTCCATCAGCGGCATCCCTGACAGATTCTCCGGCTCTGGCTCTGGCACCGAGTTTACCCTGACCATCTCCT
CCGTGCAGTCCGAGGATTTCGCCGTGTACTACTGCCAGCAGAACAACAACTGGCCCACCACCTTTGGACCCGGCACC
AAGCTGACCGTGCTGTGA
>Sequence ID 51: SI-75X18 Chain B Amino Acid Sequence
DPQLTQSPSSLSATVGQRVTINCQSSQSVAKNNNLAWFQQKPGKPPKLLIYSASTLAAGVPSRFSGSGSGTQFTLTI
TRVQSEDFATYYCSARDSGNIQSFGGGTRVEIKRTVAAPSVFIFPPSDEQLKSGTASVVCLLNNFYPREAKVQWKVD
NALQSGNSQESVTEQDSKDSTYSLSSTLTLSKADYEKHKVYACEVTHQGLSSPVTKSFNRGECGGDKTHTCPPCPAP
EAAGGPSVFLFPPKPKDTLMISRTPEVTCVVVDVSHEDPEVKFNWYVDGVEVHNAKTKPREEQYNSTYRVVSVLTVL
HQDWLNGKEYKCAVSNKALPAPIEKTISKAKGQPREPQVYTLPPSRDELTKNQVSLWCLVKGFYPSDIAVEWESNGQ
PENNYKTTPPVLDSDGSFFLYSKLTVDKSRWQQGNVFSCSVMHEALHNRFTQKSLSLSPGGGGGSGGGGSQVQLQES
GGGLVKPGGSLSLSCAASGFTFSSYWMSWVRQAPGKGLEWVANINRDGSASYYVDSVKGRFTISRDDAKNSLYLQMN
SLRAEDTAVYYCARDRGVGYFDLWGRGTLVTVSSGGGGSGGGGSGGGGSQSALTQPASVSGSPGQSITISCTGTSSD
VGGYNFVSWYQQHPGKAPKLMIYDVSDRPSGVSDRFSGSKSGNTASLIISGLQADDEADYYCSSYGSSSTHVIFGGG
TKVTVL
>Sequence ID 52: SI-75X18 Chain B Nucleotide Sequence
GATCCTCAATTGACCCAGTCCCCTAGTAGCCTTTCTGCAACCGTGGGCCAGAGGGTAACAATCAATTGCCAGTCAAG
CCAGTCCGTAGCGAAGAATAATAATTTGGCATGGTTCCAACAAAAACCGGGTAAACCTCCTAAACTCCTTATCTACT
CAGCTTCAACCCTTGCCGCGGGTGTGCCCAGCCGGTTCTCAGGCTCAGGTTCCGGGACTCAATTTACACTTACCATC
ACTCGCGTCCAAAGTGAGGATTTTGCAACCTACTATTGTTCTGCACGGGATTCCGGGAACATACAGTCCTTTGGGGG
TGGAACTCGGGTGGAGATAAAACGTACGGTGGCTGCCCCCTCTGTGTTCATCTTCCCACCCAGTGATGAGCAGCTGA
AGAGTGGCACAGCCTCTGTGGTGTGCCTGCTCAACAACTTCTACCCCAGAGAAGCCAAGGTGCAGTGGAAGGTGGAC
AATGCCCTGCAGAGTGGCAACAGCCAGGAGAGTGTGACAGAGCAGGACAGCAAGGACAGCACCTACAGCCTGTCCTC
CACCCTGACCCTGTCCAAGGCTGACTATGAGAAGCACAAGGTGTATGCCTGTGAGGTGACCCACCAGGGCCTGAGCA
GCCCTGTGACCAAGAGCTTCAACCGAGGAGAGTGTGGAGGAGACAAGACCCACACCTGCCCTCCCTGCCCAGCCCCA
GAAGCTGCTGGAGGCCCCTCTGTGTTCCTCTTCCCTCCCAAGCCCAAGGACACCCTGATGATCTCCAGGACCCCAGA
AGTCACCTGTGTGGTGGTGGATGTGTCCCATGAAGACCCAGAAGTGAAGTTCAACTGGTATGTGGATGGAGTGGAAG
TGCACAATGCCAAGACCAAGCCCAGAGAAGAGCAGTACAACAGCACCTACCGAGTGGTGTCTGTGCTGACTGTGCTG
CACCAGGACTGGCTGAATGGGAAGGAGTACAAGTGTGCTGTGTCCAACAAGGCCCTGCCTGCCCCCATTGAGAAGAC
CATCTCCAAGGCCAAGGGCCAGCCCAGAGAGCCCCAGGTCTACACCCTGCCTCCCTCCAGAGATGAGCTGACCAAGA
ACCAGGTGTCCCTGTGGTGCCTGGTGAAAGGCTTCTACCCCAGTGACATTGCTGTGGAGTGGGAGAGCAATGGCCAG
CCAGAGAACAACTACAAGACCACCCCTCCTGTGCTGGACTCTGATGGCTCCTTCTTCCTGTACAGCAAGCTGACTGT
GGACAAGAGCCGCTGGCAGCAGGGCAATGTGTTCTCCTGCTCTGTCATGCATGAGGCCCTGCACAACCGCTTCACCC
AGAAGAGCCTGAGCCTGAGCCCTGGAGGAGGAGGAGGCTCTGGAGGAGGAGGATCCCAGGTGCAGCTGCAGGAGTCG
GGGGGAGGCCTGGTCAAGCCTGGAGGGTCCCTGAGCCTCTCCTGTGCAGCCTCTGGATTCACCTTTAGTAGTTATTG
GATGAGCTGGGTCCGCCAGGCTCCAGGGAAGGGGCTGGAGTGGGTGGCCAACATAAACCGCGATGGAAGTGCGAGTT
ACTATGTGGACTCTGTGAAGGGCCGATTCACCATCTCCAGAGACGACGCCAAGAACTCACTGTATCTGCAAATGAAC
AGCCTGAGAGCTGAGGACACGGCTGTGTATTACTGTGCGAGAGATCGTGGGGTGGGCTACTTCGATCTCTGGGGCCG
TGGCACCCTGGTCACCGTGTCTAGCGGTGGAGGCGGTTCAGGCGGAGGTGGTTCCGGCGGTGGCGGCTCCCAGTCTG
CCCTGACTCAGCCTGCCTCCGTGTCTGGGTCTCCTGGACAGTCGATCACCATCTCCTGCACTGGAACCAGCAGTGAC
GTTGGTGGTTATAACTTTGTCTCCTGGTACCAACAACACCCAGGCAAAGCCCCCAAACTCATGATCTATGATGTCAG
TGATCGGCCCTCAGGGGTGTCTGATCGCTTCTCCGGCTCCAAGTCTGGCAACACGGCCTCCCTGATCATCTCTGGCC
TCCAGGCTGACGACGAGGCTGATTATTACTGCAGCTCATATGGGAGCAGCAGCACTCATGTGATTTTCGGCGGAGGG
ACCAAGGTGACCGTCCTATAA
>Sequence ID 53: SI-75X1 Chain A Amino Acid Sequence
EIVLTQSPSTLSVSPGERATFSCRASQSIGTNIHWYQQKPGKPPRLLIKYASESISGIPDRFSGSGSGTEFTLTISS
VQSEDFAVYYCQQNNNWPTTFGPGTKLTVLGGGGSGGGGSGGGGSGGGGSQVQLQQSGPGLVKPSETLSITCTVSGF
SLTNYGVHWIRQAPGKGLEWLGVIWSGGNTDYNTPFTSRFTITKDNSKNQVYFKLRSVRADDTAIYYCARALTYYDY
EFAYWGQGTLVTVSSGGGGSGGGGSEVQLVESGGGLVQPGGSLRLSCAASGFTISTNAMSWVRQAPGKGLEWIGVIT
GRDITYYASWAKGRFTISRDNSKNTLYLQMNSLRAEDTAVYYCARDGGSSAITSNNIWGQGTLVTVSSASTKGPSVF
PLAPSSKSTSGGTAALGCLVKDYFPEPVTVSWNSGALTSGVHTFPAVLQSSGLYSLSSVVTVPSSSLGTQTYICNVN
HKPSNTKVDKRVEPKSCDKTHTCPPCPAPEAAGGPSVFLFPPKPKDTLMISRTPEVTCVVVDVSHEDPEVKFNWYVD
GVEVHNAKTKPREEQYNSTYRVVSVLTVLHQDWLNGKEYKCAVSNKALPAPIEKTISKAKGQPREPQVYTLPPSRDE
LTKNQVSLSCAVKGFYPSDIAVEWESNGQPENNYKTTPPVLDSDGSFFLVSKLTVDKSRWQQGNVFSCSVMHEALHN
HYTQKSLSLSPG
>Sequence ID 54: SI-75X1 Chain A Nucleotide Sequence
GAAATCGTCCTTACACAATCTCCTAGCACACTGAGTGTGAGCCCCGGCGAACGCGCGACTTTCTCTTGCAGGGCAAG
TCAATCCATAGGGACTAATATACATTGGTATCAACAAAAGCCAGGTAAACCACCCAGGCTTTTGATTAAGTATGCAA
GTGAGTCTATTTCCGGTATCCCTGACCGCTTCTCTGGATCAGGCAGTGGCACAGAGTTCACACTCACCATATCTAGT
GTGCAATCAGAGGACTTCGCCGTGTATTACTGCCAACAGAATAATAACTGGCCGACTACCTTCGGACCCGGTACAAA
GCTGACCGTTTTAGGCGGTGGCGGTAGTGGGGGAGGCGGTTCTGGCGGCGGAGGGTCCGGCGGTGGAGGATCACAAG
TACAGTTGCAGCAATCCGGTCCCGGTCTCGTCAAACCGAGTGAGACGCTTAGTATAACGTGTACTGTTTCAGGCTTT
AGCCTTACGAACTATGGAGTTCACTGGATTCGGCAGGCACCCGGCAAAGGTTTGGAATGGCTGGGTGTTATTTGGTC
AGGTGGAAATACAGACTATAACACCCCCTTTACAAGTCGGTTCACAATTACGAAAGATAATTCCAAAAATCAAGTTT
ATTTCAAGTTGAGATCCGTCCGCGCGGACGACACTGCGATCTACTATTGTGCGAGGGCACTGACCTACTACGATTAC
GAATTTGCGTATTGGGGGCAAGGGACTCTTGTAACAGTCTCGAGCGGCGGTGGAGGGTCCGGCGGTGGTGGATCAGA
GGTGCAGCTGGTGGAGTCTGGGGGAGGCTTGGTCCAGCCTGGGGGGTCCCTGAGACTCTCCTGTGCAGCCTCTGGAT
TCACCATCAGTACCAATGCAATGAGCTGGGTCCGCCAGGCTCCAGGGAAGGGGCTGGAGTGGATCGGAGTCATTACT
GGTCGTGATATCACATACTACGCGAGCTGGGCGAAAGGCAGATTCACCATCTCCAGAGACAATTCCAAGAACACGCT
GTATCTTCAAATGAACAGCCTGAGAGCCGAGGACACGGCTGTGTATTACTGTGCGAGAGACGGTGGTTCTTCTGCTA
TTACTAGTAACAACATTTGGGGCCAGGGAACCCTGGTCACCGTGTCCTCAGCTAGCACCAAAGGCCCCTCTGTGTTC
CCTCTGGCCCCCTCCTCCAAGAGCACCTCTGGAGGCACTGCTGCCCTGGGCTGCCTGGTGAAGGACTACTTCCCAGA
GCCTGTGACTGTGTCCTGGAACTCTGGAGCCCTGACCTCTGGAGTGCACACCTTCCCTGCTGTGCTGCAGAGCTCTG
GCCTCTACAGCCTGTCCTCTGTGGTCACTGTGCCCTCCTCCAGCCTGGGCACCCAGACCTACATCTGCAATGTGAAC
CACAAGCCCTCCAACACCAAGGTGGACAAGAGAGTGGAGCCCAAGTCCTGTGACAAGACCCACACCTGCCCTCCCTG
CCCAGCCCCAGAGGCTGCTGGAGGCCCCTCTGTGTTCCTCTTCCCTCCCAAGCCCAAGGACACCCTGATGATCTCCA
GGACCCCAGAAGTCACCTGTGTGGTGGTGGATGTGTCCCATGAAGACCCAGAAGTGAAGTTCAACTGGTATGTGGAT
GGAGTGGAGGTGCACAATGCCAAGACCAAGCCCAGAGAAGAGCAGTACAACTCCACCTACCGAGTGGTGTCTGTGCT
GACTGTGCTGCACCAGGACTGGCTGAATGGGAAGGAGTACAAGTGTGCTGTGTCCAACAAGGCCCTGCCTGCCCCCA
TTGAGAAGACCATCTCCAAGGCCAAGGGCCAGCCCAGAGAGCCCCAGGTCTACACCCTGCCTCCCTCCAGAGATGAG
CTGACCAAGAACCAGGTGTCCCTGTCCTGTGCTGTGAAAGGCTTCTACCCCAGTGACATTGCTGTGGAGTGGGAGAG
CAATGGCCAGCCAGAGAACAACTACAAGACCACCCCTCCTGTGCTGGACTCTGATGGCTCCTTCTTCCTGGTCTCCA
AGCTGACTGTGGACAAGAGCCGCTGGCAGCAGGGCAATGTGTTCTCCTGCTCTGTCATGCATGAGGCCCTGCACAAC
CACTACACCCAGAAGAGCCTGAGCCTGAGCCCTGGATGA
>Sequence ID 55: SI-75X1 Chain B Amino Acid Sequence
DVVMTQSPSTLSASVGDRVTINCQASESISSWLAWYQQKPGKAPKLLIYEASKLASGVPSRFSGSGSGTEFTLTISS
LQPDDFATYYCQGYFYFISRTYVNSFGGGTKVEIKRTVAAPSVFIFPPSDEQLKSGTASVVCLLNNFYPREAKVQWK
VDNALQSGNSQESVTEQDSKDSTYSLSSTLTLSKADYEKHKVYACEVTHQGLSSPVTKSFNRGECGGDKTHTCPPCP
APEAAGGPSVFLFPPKPKDTLMISRTPEVTCVVVDVSHEDPEVKFNWYVDGVEVHNAKTKPREEQYNSTYRVVSVLT
VLHQDWLNGKEYKCAVSNKALPAPIEKTISKAKGQPREPQVYTLPPSRDELTKNQVSLWCLVKGFYPSDIAVEWESN
GQPENNYKTTPPVLDSDGSFFLYSKLTVDKSRWQQGNVFSCSVMHEALHNRFTQKSLSLSPG
>Sequence ID 56: SI-75X1 Chain B Nucleotide Sequence
GACGTGGTCATGACACAGAGCCCTTCCACACTGTCTGCCTCCGTGGGCGATAGAGTGACCATCAACTGTCAGGCCTC
CGAGTCCATCTCCTCTTGGCTGGCTTGGTATCAGCAGAAGCCTGGCAAGGCCCCTAAGCTGCTGATCTACGAGGCTT
CCAAGCTGGCCTCTGGCGTGCCCTCTAGATTTTCCGGCTCTGGCTCTGGCACCGAGTTTACCCTGACAATCTCCAGC
CTGCAGCCTGACGACTTCGCCACCTACTACTGCCAAGGCTACTTCTACTTCATCTCCCGGACCTACGTGAACTCCTT
CGGCGGAGGCACCAAGGTGGAGATCAAGCGTACGGTGGCTGCCCCCTCTGTGTTCATCTTCCCACCCAGTGATGAGC
AGCTGAAGAGTGGCACAGCCTCTGTGGTGTGCCTGCTCAACAACTTCTACCCCAGAGAAGCCAAGGTGCAGTGGAAG
GTGGACAATGCCCTGCAGAGTGGCAACAGCCAGGAGAGTGTGACAGAGCAGGACAGCAAGGACAGCACCTACAGCCT
GTCCTCCACCCTGACCCTGTCCAAGGCTGACTATGAGAAGCACAAGGTGTATGCCTGTGAGGTGACCCACCAGGGCC
TGAGCAGCCCTGTGACCAAGAGCTTCAACCGAGGAGAGTGTGGAGGAGACAAGACCCACACCTGCCCTCCCTGCCCA
GCCCCAGAAGCTGCTGGAGGCCCCTCTGTGTTCCTCTTCCCTCCCAAGCCCAAGGACACCCTGATGATCTCCAGGAC
CCCAGAAGTCACCTGTGTGGTGGTGGATGTGTCCCATGAAGACCCAGAAGTGAAGTTCAACTGGTATGTGGATGGAG
TGGAAGTGCACAATGCCAAGACCAAGCCCAGAGAAGAGCAGTACAACAGCACCTACCGAGTGGTGTCTGTGCTGACT
GTGCTGCACCAGGACTGGCTGAATGGGAAGGAGTACAAGTGTGCTGTGTCCAACAAGGCCCTGCCTGCCCCCATTGA
GAAGACCATCTCCAAGGCCAAGGGCCAGCCCAGAGAGCCCCAGGTCTACACCCTGCCTCCCTCCAGAGATGAGCTGA
CCAAGAACCAGGTGTCCCTGTGGTGCCTGGTGAAAGGCTTCTACCCCAGTGACATTGCTGTGGAGTGGGAGAGCAAT
GGCCAGCCAGAGAACAACTACAAGACCACCCCTCCTGTGCTGGACTCTGATGGCTCCTTCTTCCTGTACAGCAAGCT
GACTGTGGACAAGAGCCGCTGGCAGCAGGGCAATGTGTTCTCCTGCTCTGTCATGCATGAGGCCCTGCACAACCGCT
TCACCCAGAAGAGCCTGAGCCTGAGCCCTGGATGA
>Sequence ID 57: SI-75X2 Chain A Amino Acid Sequence
EVQLVESGGGLVQPGGSLRLSCAASGETISTNAMSWVRQAPGKGLEWIGVITGRDITYYASWAKGRFTISRDNSKNT
LYLQMNSLRAEDTAVYYCARDGGSSAITSNNIWGQGTLVTVSSASTKGPSVFPLAPSSKSTSGGTAALGCLVKDYFP
EPVTVSWNSGALTSGVHTFPAVLQSSGLYSLSSVVTVPSSSLGTQTYICNVNHKPSNTKVDKRVEPKSCDKTHTCPP
CPAPEAAGGPSVFLFPPKPKDTLMISRTPEVTCVVVDVSHEDPEVKFNWYVDGVEVHNAKTKPREEQYNSTYRVVSV
LTVLHQDWLNGKEYKCAVSNKALPAPIEKTISKAKGQPREPQVYTLPPSRDELTKNQVSLSCAVKGFYPSDIAVEWE
SNGQPENNYKTTPPVLDSDGSFFLVSKLTVDKSRWQQGNVFSCSVMHEALHNHYTQKSLSLSPG
>Sequence ID 58: SI-75X2 Chain A Nucleotide Sequence
GAGGTGCAGCTGGTTGAATCTGGCGGAGGATTGGTTCAGCCTGGCGGCTCTCTGAGACTGTCTTGTGCCGCTTCTGG
CTTCACCATCTCCACCAACGCCATGTCCTGGGTCCGACAGGCTCCTGGCAAAGGCCTGGAATGGATCGGCGTGATCA
CCGGCAGAGATATTACCTACTACGCCTCCTGGGCCAAGGGCAGATTCACCATCAGCCGGGACAACTCCAAGAACACC
CTGTACCTGCAGATGAACTCCCTGAGAGCCGAGGACACCGCCGTGTACTACTGTGCTAGAGATGGCGGCAGCAGCGC
CATCACCTCCAACAATATTTGGGGCCAGGGCACCCTGGTCACTGTGTCCTCTGCTAGCACCAAAGGCCCCTCTGTGT
TCCCTCTGGCCCCCTCCTCCAAGAGCACCTCTGGAGGCACTGCTGCCCTGGGCTGCCTGGTGAAGGACTACTTCCCA
GAGCCTGTGACTGTGTCCTGGAACTCTGGAGCCCTGACCTCTGGAGTGCACACCTTCCCTGCTGTGCTGCAGAGCTC
TGGCCTCTACAGCCTGTCCTCTGTGGTCACTGTGCCCTCCTCCAGCCTGGGCACCCAGACCTACATCTGCAATGTGA
ACCACAAGCCCTCCAACACCAAGGTGGACAAGAGAGTGGAGCCCAAGTCCTGTGACAAGACCCACACCTGCCCTCCC
TGCCCAGCCCCAGAGGCTGCTGGAGGCCCCTCTGTGTTCCTCTTCCCTCCCAAGCCCAAGGACACCCTGATGATCTC
CAGGACCCCAGAAGTCACCTGTGTGGTGGTGGATGTGTCCCATGAAGACCCAGAAGTGAAGTTCAACTGGTATGTGG
ATGGAGTGGAGGTGCACAATGCCAAGACCAAGCCCAGAGAAGAGCAGTACAACTCCACCTACCGAGTGGTGTCTGTG
CTGACTGTGCTGCACCAGGACTGGCTGAATGGGAAGGAGTACAAGTGTGCTGTGTCCAACAAGGCCCTGCCTGCCCC
CATTGAGAAGACCATCTCCAAGGCCAAGGGCCAGCCCAGAGAGCCCCAGGTCTACACCCTGCCTCCCTCCAGAGATG
AGCTGACCAAGAACCAGGTGTCCCTGTCCTGTGCTGTGAAAGGCTTCTACCCCAGTGACATTGCTGTGGAGTGGGAG
AGCAATGGCCAGCCAGAGAACAACTACAAGACCACCCCTCCTGTGCTGGACTCTGATGGCTCCTTCTTCCTGGTCTC
CAAGCTGACTGTGGACAAGAGCCGCTGGCAGCAGGGCAATGTGTTCTCCTGCTCTGTCATGCATGAGGCCCTGCACA
ACCACTACACCCAGAAGAGCCTGAGCCTGAGCCCTGGATGA
>Sequence ID 59: SI-75X2 Chain B Amino Acid Sequence
QSALTQPASVSGSPGQSITISCTGTSSDVGGYNFVSWYQQHPGKAPKLMIYDVSDRPSGVSDRFSGSKSGNTASLII
SGLQADDEADYYCSSYGSSSTHVIFGGGTKVTVLGGGGSGGGGSGGGGSGGGGSQVQLQESGGGLVKPGGSLSLSCA
ASGFTFSSYWMSWVRQAPGKGLEWVANINRDGSASYYVDSVKGRFTISRDDAKNSLYLQMNSLRAEDTAVYYCARDR
GVGYFDLWGRGTLVTVSSGGGGSGGGGSDVVMTQSPSTLSASVGDRVTINCQASESISSWLAWYQQKPGKAPKLLIY
EASKLASGVPSRFSGSGSGTEFTLTISSLQPDDFATYYCQGYFYFISRTYVNSFGGGTKVEIKRTVAAPSVFIFPPS
DEQLKSGTASVVCLLNNFYPREAKVQWKVDNALQSGNSQESVTEQDSKDSTYSLSSTLTLSKADYEKHKVYACEVTH
QGLSSPVTKSFNRGECGGDKTHTCPPCPAPEAAGGPSVFLFPPKPKDTLMISRTPEVTCVVVDVSHEDPEVKFNWYV
DGVEVHNAKTKPREEQYNSTYRVVSVLTVLHQDWLNGKEYKCAVSNKALPAPIEKTISKAKGQPREPQVYTLPPSRD
ELTKNQVSLWCLVKGFYPSDIAVEWESNGQPENNYKTTPPVLDSDGSFFLYSKLTVDKSRWQQGNVFSCSVMHEALH
NRFTQKSLSLSPG
>Sequence ID 60: SI-75X2 Chain B Nucleotide Sequence
CAGTCTGCCCTGACTCAGCCTGCCTCCGTGTCTGGGTCTCCTGGACAGTCGATCACCATCTCCTGCACTGGAACCAG
CAGTGACGTTGGTGGTTATAACTTTGTCTCCTGGTACCAACAACACCCAGGCAAAGCCCCCAAACTCATGATCTATG
ATGTCAGTGATCGGCCCTCAGGGGTGTCTGATCGCTTCTCCGGCTCCAAGTCTGGCAACACGGCCTCCCTGATCATC
TCTGGCCTCCAGGCTGACGACGAGGCTGATTATTACTGCAGCTCATATGGGAGCAGCAGCACTCATGTGATTTTCGG
CGGAGGGACCAAGGTGACCGTCCTAGGCGGTGGCGGTAGTGGGGGAGGCGGTTCTGGCGGCGGAGGGTCCGGCGGTG
GAGGATCACAGGTGCAATTGCAGGAGTCGGGGGGAGGCCTGGTCAAGCCTGGAGGGTCCCTGAGCCTCTCCTGTGCA
GCCTCTGGATTCACCTTTAGTAGTTATTGGATGAGCTGGGTCCGCCAGGCTCCAGGGAAGGGGCTGGAGTGGGTGGC
CAACATAAACCGCGATGGAAGTGCGAGTTACTATGTGGACTCTGTGAAGGGCCGATTCACCATCTCCAGAGACGACG
CCAAGAACTCACTGTATCTGCAAATGAACAGCCTGAGAGCTGAGGACACGGCTGTGTATTACTGTGCGAGAGATCGT
GGGGTGGGCTACTTCGATCTCTGGGGCCGTGGCACCCTGGTCACCGTCTCGAGCGGCGGTGGAGGGTCCGGCGGTGG
TGGATCAGACGTCGTGATGACCCAGTCTCCTTCCACCCTGTCTGCATCTGTAGGAGACAGAGTCACCATCAATTGCC
AAGCCAGTGAGAGCATTAGCAGTTGGTTAGCCTGGTATCAGCAGAAACCAGGGAAAGCCCCTAAGCTCCTGATCTAT
GAAGCATCCAAACTGGCATCTGGGGTCCCATCAAGGTTCAGCGGCAGTGGATCTGGGACAGAATTCACTCTCACCAT
CAGCAGCCTGCAGCCTGATGATTTTGCAACTTATTACTGCCAAGGCTATTTTTATTTTATTAGTCGTACTTATGTAA
ATTCTTTCGGCGGAGGGACCAAGGTGGAGATCAAACGTACGGTGGCTGCCCCCTCTGTGTTCATCTTCCCACCCAGT
GATGAGCAGCTGAAGAGTGGCACAGCCTCTGTGGTGTGCCTGCTCAACAACTTCTACCCCAGAGAAGCCAAGGTGCA
GTGGAAGGTGGACAATGCCCTGCAGAGTGGCAACAGCCAGGAGAGTGTGACAGAGCAGGACAGCAAGGACAGCACCT
ACAGCCTGTCCTCCACCCTGACCCTGTCCAAGGCTGACTATGAGAAGCACAAGGTGTATGCCTGTGAGGTGACCCAC
CAGGGCCTGAGCAGCCCTGTGACCAAGAGCTTCAACCGAGGAGAGTGTGGAGGAGACAAGACCCACACCTGCCCTCC
CTGCCCAGCCCCAGAAGCTGCTGGAGGCCCCTCTGTGTTCCTCTTCCCTCCCAAGCCCAAGGACACCCTGATGATCT
CCAGGACCCCAGAAGTCACCTGTGTGGTGGTGGATGTGTCCCATGAAGACCCAGAAGTGAAGTTCAACTGGTATGTG
GATGGAGTGGAAGTGCACAATGCCAAGACCAAGCCCAGAGAAGAGCAGTACAACAGCACCTACCGAGTGGTGTCTGT
GCTGACTGTGCTGCACCAGGACTGGCTGAATGGGAAGGAGTACAAGTGTGCTGTGTCCAACAAGGCCCTGCCTGCCC
CCATTGAGAAGACCATCTCCAAGGCCAAGGGCCAGCCCAGAGAGCCCCAGGTCTACACCCTGCCTCCCTCCAGAGAT
GAGCTGACCAAGAACCAGGTGTCCCTGTGGTGCCTGGTGAAAGGCTTCTACCCCAGTGACATTGCTGTGGAGTGGGA
GAGCAATGGCCAGCCAGAGAACAACTACAAGACCACCCCTCCTGTGCTGGACTCTGATGGCTCCTTCTTCCTGTACA
GCAAGCTGACTGTGGACAAGAGCCGCTGGCAGCAGGGCAATGTGTTCTCCTGCTCTGTCATGCATGAGGCCCTGCAC
AACCGCTTCACCCAGAAGAGCCTGAGCCTGAGCCCTGGATGA
>Sequence ID 61: SI-75O2 Chain A Amino Acid Sequence
EVQLVESGGGLVQPGGSLRLSCAASGFTISTNAMSWVRQAPGKGLEWIGVITGRDITYYASWAKGRFTISRDNSKNT
LYLQMNSLRAEDTAVYYCARDGGSSAITSNNIWGQGTLVTVSSASTKGPSVFPLAPSSKSTSGGTAALGCLVKDYFP
EPVTVSWNSGALTSGVHTFPAVLQSSGLYSLSSVVTVPSSSLGTQTYICNVNHKPSNTKVDKRVEPKSCDKTHTCPP
CPAPEAAGGPSVFLFPPKPKDTLMISRTPEVTCVVVDVSHEDPEVKFNWYVDGVEVHNAKTKPREEQYNSTYRVVSV
LTVLHQDWLNGKEYKCAVSNKALPAPIEKTISKAKGQPREPQVYTLPPSRDELTKNQVSLSCAVKGFYPSDIAVEWE
SNGQPENNYKTTPPVLDSDGSFFLVSKLTVDKSRWQQGNVFSCSVMHEALHNHYTQKSLSLSPG
>Sequence ID 62: SI-75O2 Chain A Nucleotide Sequence
GAGGTGCAGCTGGTTGAATCTGGCGGAGGATTGGTTCAGCCTGGCGGCTCTCTGAGACTGTCTTGTGCCGCTTCTGG
CTTCACCATCTCCACCAACGCCATGTCCTGGGTCCGACAGGCTCCTGGCAAAGGCCTGGAATGGATCGGCGTGATCA
CCGGCAGAGATATTACCTACTACGCCTCCTGGGCCAAGGGCAGATTCACCATCAGCCGGGACAACTCCAAGAACACC
CTGTACCTGCAGATGAACTCCCTGAGAGCCGAGGACACCGCCGTGTACTACTGTGCTAGAGATGGCGGCAGCAGCGC
CATCACCTCCAACAATATTTGGGGCCAGGGCACCCTGGTCACTGTGTCCTCTGCTAGCACCAAAGGCCCCTCTGTGT
TCCCTCTGGCCCCCTCCTCCAAGAGCACCTCTGGAGGCACTGCTGCCCTGGGCTGCCTGGTGAAGGACTACTTCCCA
GAGCCTGTGACTGTGTCCTGGAACTCTGGAGCCCTGACCTCTGGAGTGCACACCTTCCCTGCTGTGCTGCAGAGCTC
TGGCCTCTACAGCCTGTCCTCTGTGGTCACTGTGCCCTCCTCCAGCCTGGGCACCCAGACCTACATCTGCAATGTGA
ACCACAAGCCCTCCAACACCAAGGTGGACAAGAGAGTGGAGCCCAAGTCCTGTGACAAGACCCACACCTGCCCTCCC
TGCCCAGCCCCAGAGGCTGCTGGAGGCCCCTCTGTGTTCCTCTTCCCTCCCAAGCCCAAGGACACCCTGATGATCTC
CAGGACCCCAGAAGTCACCTGTGTGGTGGTGGATGTGTCCCATGAAGACCCAGAAGTGAAGTTCAACTGGTATGTGG
ATGGAGTGGAGGTGCACAATGCCAAGACCAAGCCCAGAGAAGAGCAGTACAACTCCACCTACCGAGTGGTGTCTGTG
CTGACTGTGCTGCACCAGGACTGGCTGAATGGGAAGGAGTACAAGTGTGCTGTGTCCAACAAGGCCCTGCCTGCCCC
CATTGAGAAGACCATCTCCAAGGCCAAGGGCCAGCCCAGAGAGCCCCAGGTCTACACCCTGCCTCCCTCCAGAGATG
AGCTGACCAAGAACCAGGTGTCCCTGTCCTGTGCTGTGAAAGGCTTCTACCCCAGTGACATTGCTGTGGAGTGGGAG
AGCAATGGCCAGCCAGAGAACAACTACAAGACCACCCCTCCTGTGCTGGACTCTGATGGCTCCTTCTTCCTGGTCTC
CAAGCTGACTGTGGACAAGAGCCGCTGGCAGCAGGGCAATGTGTTCTCCTGCTCTGTCATGCATGAGGCCCTGCACA
ACCACTACACCCAGAAGAGCCTGAGCCTGAGCCCTGGATGA
>Sequence ID 63: SI-75O2 Chain B Amino Acid Sequence
DVVMTQSPSTLSASVGDRVTINCQASESISSWLAWYQQKPGKAPKLLIYEASKLASGVPSRFSGSGSGTEFTLTISS
LQPDDFATYYCQGYFYFISRTYVNSFGGGTKVEIKRTVAAPSVFIFPPSDEQLKSGTASVVCLLNNFYPREAKVQWK
VDNALQSGNSQESVTEQDSKDSTYSLSSTLTLSKADYEKHKVYACEVTHQGLSSPVTKSFNRGECGGDKTHTCPPCP
APEAAGGPSVFLFPPKPKDTLMISRTPEVTCVVVDVSHEDPEVKFNWYVDGVEVHNAKTKPREEQYNSTYRVVSVLT
VLHQDWLNGKEYKCAVSNKALPAPIEKTISKAKGQPREPQVYTLPPSRDELTKNQVSLWCLVKGFYPSDIAVEWESN
GQPENNYKTTPPVLDSDGSFFLYSKLTVDKSRWQQGNVFSCSVMHEALHNRFTQKSLSLSPG
>Sequence ID 64: SI-75O2 Chain B Nucleotide Sequence
GACGTGGTCATGACACAGAGCCCTTCCACACTGTCTGCCTCCGTGGGCGATAGAGTGACCATCAACTGTCAGGCCTC
CGAGTCCATCTCCTCTTGGCTGGCTTGGTATCAGCAGAAGCCTGGCAAGGCCCCTAAGCTGCTGATCTACGAGGCTT
CCAAGCTGGCCTCTGGCGTGCCCTCTAGATTTTCCGGCTCTGGCTCTGGCACCGAGTTTACCCTGACAATCTCCAGC
CTGCAGCCTGACGACTTCGCCACCTACTACTGCCAAGGCTACTTCTACTTCATCTCCCGGACCTACGTGAACTCCTT
CGGCGGAGGCACCAAGGTGGAGATCAAGCGTACGGTGGCTGCCCCCTCTGTGTTCATCTTCCCACCCAGTGATGAGC
AGCTGAAGAGTGGCACAGCCTCTGTGGTGTGCCTGCTCAACAACTTCTACCCCAGAGAAGCCAAGGTGCAGTGGAAG
GTGGACAATGCCCTGCAGAGTGGCAACAGCCAGGAGAGTGTGACAGAGCAGGACAGCAAGGACAGCACCTACAGCCT
GTCCTCCACCCTGACCCTGTCCAAGGCTGACTATGAGAAGCACAAGGTGTATGCCTGTGAGGTGACCCACCAGGGCC
TGAGCAGCCCTGTGACCAAGAGCTTCAACCGAGGAGAGTGTGGAGGAGACAAGACCCACACCTGCCCTCCCTGCCCA
GCCCCAGAAGCTGCTGGAGGCCCCTCTGTGTTCCTCTTCCCTCCCAAGCCCAAGGACACCCTGATGATCTCCAGGAC
CCCAGAAGTCACCTGTGTGGTGGTGGATGTGTCCCATGAAGACCCAGAAGTGAAGTTCAACTGGTATGTGGATGGAG
TGGAAGTGCACAATGCCAAGACCAAGCCCAGAGAAGAGCAGTACAACAGCACCTACCGAGTGGTGTCTGTGCTGACT
GTGCTGCACCAGGACTGGCTGAATGGGAAGGAGTACAAGTGTGCTGTGTCCAACAAGGCCCTGCCTGCCCCCATTGA
GAAGACCATCTCCAAGGCCAAGGGCCAGCCCAGAGAGCCCCAGGTCTACACCCTGCCTCCCTCCAGAGATGAGCTGA
CCAAGAACCAGGTGTCCCTGTGGTGCCTGGTGAAAGGCTTCTACCCCAGTGACATTGCTGTGGAGTGGGAGAGCAAT
GGCCAGCCAGAGAACAACTACAAGACCACCCCTCCTGTGCTGGACTCTGATGGCTCCTTCTTCCTGTACAGCAAGCT
GACTGTGGACAAGAGCCGCTGGCAGCAGGGCAATGTGTTCTCCTGCTCTGTCATGCATGAGGCCCTGCACAACCGCT
TCACCCAGAAGAGCCTGAGCCTGAGCCCTGGATGA
>Sequence ID 65: SI-7507 Chain A Amino Acid Sequence
QVQLQESGGRLVQPGEPLSLTCKTSGIDLSSNAIGWVRQAPGKGLEWIGVIFGSGNTYYASWAKGRFTISRSTSTVY
LKMNSLRSEDTAIYYCARGGYSSDIWGQGTLVTVSSASTKGPSVFPLAPSSKSTSGGTAALGCLVKDYFPEPVTVSW
NSGALTSGVHTFPAVLQSSGLYSLSSVVTVPSSSLGTQTYICNVNHKPSNTKVDKRVEPKSCDKTHTCPPCPAPEAA
GGPSVFLFPPKPKDTLMISRTPEVTCVVVDVSHEDPEVKFNWYVDGVEVHNAKTKPREEQYNSTYRVVSVLTVLHQD
WLNGKEYKCAVSNKALPAPIEKTISKAKGQPREPQVYTLPPSRDELTKNQVSLSCAVKGFYPSDIAVEWESNGQPEN
NYKTTPPVLDSDGSFFLVSKLTVDKSRWQQGNVFSCSVMHEALHNHYTQKSLSLSPG
>Sequence ID 66: SI-7507 Chain A Nucleotide Sequence
CAAGTGCAGTTGCAAGAAAGTGGTGGTAGACTGGTTCAGCCTGGTGAACCCTTGTCACTGACGTGTAAAACAAGCGG
CATTGATCTGTCCTCTAACGCCATCGGATGGGTCCGACAGGCCCCAGGAAAAGGTCTGGAGTGGATCGGAGTTATCT
TCGGGAGCGGCAATACATACTACGCAAGCTGGGCAAAAGGGCGATTTACGATATCACGGAGCACCTCTACAGTTTAT
TTGAAAATGAACTCCCTCCGGTCCGAGGATACCGCGATATATTACTGTGCCAGAGGGGGGTACTCCTCTGATATCTG
GGGGCAGGGTACACTGGTTACAGTTTCATCCGCTAGCACCAAAGGCCCCTCTGTGTTCCCTCTGGCCCCCTCCTCCA
AGAGCACCTCTGGAGGCACTGCTGCCCTGGGCTGCCTGGTGAAGGACTACTTCCCAGAGCCTGTGACTGTGTCCTGG
AACTCTGGAGCCCTGACCTCTGGAGTGCACACCTTCCCTGCTGTGCTGCAGAGCTCTGGCCTCTACAGCCTGTCCTC
TGTGGTCACTGTGCCCTCCTCCAGCCTGGGCACCCAGACCTACATCTGCAATGTGAACCACAAGCCCTCCAACACCA
AGGTGGACAAGAGAGTGGAGCCCAAGTCCTGTGACAAGACCCACACCTGCCCTCCCTGCCCAGCCCCAGAGGCTGCT
GGAGGCCCCTCTGTGTTCCTCTTCCCTCCCAAGCCCAAGGACACCCTGATGATCTCCAGGACCCCAGAAGTCACCTG
TGTGGTGGTGGATGTGTCCCATGAAGACCCAGAAGTGAAGTTCAACTGGTATGTGGATGGAGTGGAGGTGCACAATG
CCAAGACCAAGCCCAGAGAAGAGCAGTACAACTCCACCTACCGAGTGGTGTCTGTGCTGACTGTGCTGCACCAGGAC
TGGCTGAATGGGAAGGAGTACAAGTGTGCTGTGTCCAACAAGGCCCTGCCTGCCCCCATTGAGAAGACCATCTCCAA
GGCCAAGGGCCAGCCCAGAGAGCCCCAGGTCTACACCCTGCCTCCCTCCAGAGATGAGCTGACCAAGAACCAGGTGT
CCCTGTCCTGTGCTGTGAAAGGCTTCTACCCCAGTGACATTGCTGTGGAGTGGGAGAGCAATGGCCAGCCAGAGAAC
AACTACAAGACCACCCCTCCTGTGCTGGACTCTGATGGCTCCTTCTTCCTGGTCTCCAAGCTGACTGTGGACAAGAG
CCGCTGGCAGCAGGGCAATGTGTTCTCCTGCTCTGTCATGCATGAGGCCCTGCACAACCACTACACCCAGAAGAGCC
TGAGCCTGAGCCCTGGA
>Sequence ID 67: SI-7507 Chain B Amino Acid Sequence
DPQLTQSPSSLSATVGQRVTINCQSSQSVAKNNNLAWFQQKPGKPPKLLIYSASTLAAGVPSRFSGSGSGTQFTLTI
TRVQSEDFATYYCSARDSGNIQSFGGGTRVEIKRTVAAPSVFIFPPSDEQLKSGTASVVCLLNNFYPREAKVQWKVD
NALQSGNSQESVTEQDSKDSTYSLSSTLTLSKADYEKHKVYACEVTHQGLSSPVTKSFNRGECGGDKTHTCPPCPAP
EAAGGPSVFLFPPKPKDTLMISRTPEVTCVVVDVSHEDPEVKFNWYVDGVEVHNAKTKPREEQYNSTYRVVSVLTVL
HQDWLNGKEYKCAVSNKALPAPIEKTISKAKGQPREPQVYTLPPSRDELTKNQVSLWCLVKGFYPSDIAVEWESNGQ
PENNYKTTPPVLDSDGSFFLYSKLTVDKSRWQQGNVFSCSVMHEALHNRFTQKSLSLSPG
>Sequence ID 68: SI-7507 Chain B Nucleotide Sequence
GATCCTCAATTGACCCAGTCCCCTAGTAGCCTTTCTGCAACCGTGGGCCAGAGGGTAACAATCAATTGCCAGTCAAG
CCAGTCCGTAGCGAAGAATAATAATTTGGCATGGTTCCAACAAAAACCGGGTAAACCTCCTAAACTCCTTATCTACT
CAGCTTCAACCCTTGCCGCGGGTGTGCCCAGCCGGTTCTCAGGCTCAGGTTCCGGGACTCAATTTACACTTACCATC
ACTCGCGTCCAAAGTGAGGATTTTGCAACCTACTATTGTTCTGCACGGGATTCCGGGAACATACAGTCCTTTGGGGG
TGGAACTCGGGTGGAGATAAAACGTACGGTGGCTGCCCCCTCTGTGTTCATCTTCCCACCCAGTGATGAGCAGCTGA
AGAGTGGCACAGCCTCTGTGGTGTGCCTGCTCAACAACTTCTACCCCAGAGAAGCCAAGGTGCAGTGGAAGGTGGAC
AATGCCCTGCAGAGTGGCAACAGCCAGGAGAGTGTGACAGAGCAGGACAGCAAGGACAGCACCTACAGCCTGTCCTC
CACCCTGACCCTGTCCAAGGCTGACTATGAGAAGCACAAGGTGTATGCCTGTGAGGTGACCCACCAGGGCCTGAGCA
GCCCTGTGACCAAGAGCTTCAACCGAGGAGAGTGTGGAGGAGACAAGACCCACACCTGCCCTCCCTGCCCAGCCCCA
GAAGCTGCTGGAGGCCCCTCTGTGTTCCTCTTCCCTCCCAAGCCCAAGGACACCCTGATGATCTCCAGGACCCCAGA
AGTCACCTGTGTGGTGGTGGATGTGTCCCATGAAGACCCAGAAGTGAAGTTCAACTGGTATGTGGATGGAGTGGAAG
TGCACAATGCCAAGACCAAGCCCAGAGAAGAGCAGTACAACAGCACCTACCGAGTGGTGTCTGTGCTGACTGTGCTG
CACCAGGACTGGCTGAATGGGAAGGAGTACAAGTGTGCTGTGTCCAACAAGGCCCTGCCTGCCCCCATTGAGAAGAC
CATCTCCAAGGCCAAGGGCCAGCCCAGAGAGCCCCAGGTCTACACCCTGCCTCCCTCCAGAGATGAGCTGACCAAGA
ACCAGGTGTCCCTGTGGTGCCTGGTGAAAGGCTTCTACCCCAGTGACATTGCTGTGGAGTGGGAGAGCAATGGCCAG
CCAGAGAACAACTACAAGACCACCCCTCCTGTGCTGGACTCTGATGGCTCCTTCTTCCTGTACAGCAAGCTGACTGT
GGACAAGAGCCGCTGGCAGCAGGGCAATGTGTTCTCCTGCTCTGTCATGCATGAGGCCCTGCACAACCGCTTCACCC
AGAAGAGCCTGAGCCTGAGCCCTGGATGA
>Sequence ID 69: SI-68P13 Chain A Amino Acid Sequence
EIVLTQSPSTLSVSPGERATFSCRASQSIGTNIHWYQQKPGKPPRLLIKYASESISGIPDRFSGSGSGTEFTLTISS
VQSEDFAVYYCQQNNNWPTTFGPGTKLTVLGGGGSGGGGSGGGGSGGGGSQVQLQQSGPGLVKPSETLSITCTVSGF
SLTNYGVHWIRQAPGKGLEWLGVIWSGGNTDYNTPFTSRFTITKDNSKNQVYFKLRSVRADDTAIYYCARALTYYDY
EFAYWGQGTLVTVSSGGGGSGGGGSEVQLVESGGGLVQPGGSLRLSCAASGFTISTNAMSWVRQAPGKGLEWIGVIT
GRDITYYASWAKGRFTISRDNSKNTLYLQMNSLRAEDTAVYYCARDGGSSAITSNNIWGQGTLVTVSSASTKGPSVF
PLAPSSKSTSGGTAALGCLVKDYFPEPVTVSWNSGALTSGVHTFPAVLQSSGLYSLSSVVTVPSSSLGTQTYICNVN
HKPSNTKVDKRVEPKSCDKTHTCPPCPAPEAAGGPSVFLFPPKPKDTLMISRTPEVTCVVVDVSHEDPEVKFNWYVD
GVEVHNAKTKPREEQYNSTYRVVSVLTVLHQDWLNGKEYKCAVSNKALPAPIEKTISKAKGQPREPQVYTLPPSRDE
LTKNQVSLSCAVKGFYPSDIAVEWESNGQPENNYKTTPPVLDSDGSFFLVSKLTVDKSRWQQGNVFSCSVMHEALHN
HYTQKSLSLSPGGGGGSGGGGSDVVMTQSPSSVSASVGDRVTITCQASQNIRTYLSWYQQKPGKAPKLLIYAAANLA
SGVPSRFSGSGSGTDFTLTISDLEPGDAATYYCQSTYLGTDYVGGAFGGGTKLTVLGGGGSGGGGSGGGGSGGGGSE
VQLVESGGGLVQPGGSLRLSCTASGFTISSYHMQWVRQAPGKGLEYIGTISSGGNVYYASSARGRFTISRPSSKNTV
DLQMNSLRAEDTAVYYCARDSGYSDPMWGQGTLVTVSS
>Sequence ID 70: SI-68P13 Chain A Nucleotide Sequence
GAAATCGTCCTTACACAATCTCCTAGCACACTGAGTGTGAGCCCCGGCGAACGCGCGACTTTCTCTTGCAGGGCAAG
TCAATCCATAGGGACTAATATACATTGGTATCAACAAAAGCCAGGTAAACCACCCAGGCTTTTGATTAAGTATGCAA
GTGAGTCTATTTCCGGTATCCCTGACCGCTTCTCTGGATCAGGCAGTGGCACAGAGTTCACACTCACCATATCTAGT
GTGCAATCAGAGGACTTCGCCGTGTATTACTGCCAACAGAATAATAACTGGCCGACTACCTTCGGACCCGGTACAAA
GCTGACCGTTTTAGGCGGTGGCGGTAGTGGGGGAGGCGGTTCTGGCGGCGGAGGGTCCGGCGGTGGAGGATCACAAG
TACAGTTGCAGCAATCCGGTCCCGGTCTCGTCAAACCGAGTGAGACGCTTAGTATAACGTGTACTGTTTCAGGCTTT
AGCCTTACGAACTATGGAGTTCACTGGATTCGGCAGGCACCCGGCAAAGGTTTGGAATGGCTGGGTGTTATTTGGTC
AGGTGGAAATACAGACTATAACACCCCCTTTACAAGTCGGTTCACAATTACGAAAGATAATTCCAAAAATCAAGTTT
ATTTCAAGTTGAGATCCGTCCGCGCGGACGACACTGCGATCTACTATTGTGCGAGGGCACTGACCTACTACGATTAC
GAATTTGCGTATTGGGGGCAAGGGACTCTTGTAACAGTCTCGAGCGGCGGTGGAGGGTCCGGCGGTGGTGGATCAGA
GGTGCAGCTGGTGGAGTCTGGGGGAGGCTTGGTCCAGCCTGGGGGGTCCCTGAGACTCTCCTGTGCAGCCTCTGGAT
TCACCATCAGTACCAATGCAATGAGCTGGGTCCGCCAGGCTCCAGGGAAGGGGCTGGAGTGGATCGGAGTCATTACT
GGTCGTGATATCACATACTACGCGAGCTGGGCGAAAGGCAGATTCACCATCTCCAGAGACAATTCCAAGAACACGCT
GTATCTTCAAATGAACAGCCTGAGAGCCGAGGACACGGCTGTGTATTACTGTGCGAGAGACGGTGGTTCTTCTGCTA
TTACTAGTAACAACATTTGGGGCCAGGGAACCCTGGTCACCGTGTCCTCAGCTAGCACCAAGGGCCCATCGGTCTTC
CCCCTGGCACCCTCCTCCAAGAGCACCTCTGGGGGCACAGCGGCCCTGGGCTGCCTGGTCAAGGACTACTTCCCCGA
ACCGGTGACGGTGTCGTGGAACTCAGGCGCCCTGACCAGCGGCGTGCACACCTTCCCGGCTGTCCTACAGTCCTCAG
GACTCTACTCCCTCAGCAGCGTGGTGACCGTGCCCTCCAGCAGCTTGGGCACCCAGACCTACATCTGCAACGTGAAT
CACAAGCCCAGCAACACCAAGGTGGACAAGAGAGTTGAGCCCAAATCTTGTGACAAAACTCACACATGCCCACCGTG
CCCAGCACCTGAAGCCGCGGGGGGACCGTCAGTCTTCCTCTTCCCCCCAAAACCCAAGGACACCCTCATGATCTCCC
GGACCCCTGAGGTCACATGCGTGGTGGTGGACGTGAGCCACGAAGACCCTGAGGTCAAGTTCAACTGGTACGTGGAC
GGCGTGGAGGTGCATAATGCCAAGACAAAGCCGCGGGAGGAGCAGTACAACAGCACGTACCGTGTGGTCAGCGTCCT
CACCGTCCTGCACCAGGACTGGCTGAATGGCAAGGAGTACAAGTGCGCGGTCTCCAACAAAGCCCTCCCAGCCCCCA
TCGAGAAAACCATCTCCAAAGCCAAAGGGCAGCCCCGAGAACCACAGGTGTATACCCTGCCCCCATCCCGGGATGAG
CTGACCAAGAACCAGGTCAGCCTGTCCTGCGCCGTCAAAGGCTTCTATCCCAGCGACATCGCCGTGGAGTGGGAGAG
CAATGGGCAGCCGGAGAACAACTACAAGACCACGCCTCCCGTGCTGGACTCCGACGGCTCCTTCTTCCTCGTGAGCA
AGCTCACCGTGGACAAGAGCAGGTGGCAGCAGGGGAACGTCTTCTCATGCTCCGTGATGCATGAGGCTCTGCACAAC
CACTACACGCAGAAGAGCCTCTCCCTGTCTCCGGGTGGCGGCGGCGGTTCAGGTGGTGGGGGATCCGACGTTGTGAT
GACGCAGTCTCCTAGTTCAGTATCAGCGTCTGTTGGGGATCGAGTCACGATTACATGCCAGGCGAGCCAAAATATTA
GGACGTATCTGTCTTGGTATCAACAAAAGCCTGGTAAGGCTCCAAAACTCCTCATTTACGCCGCTGCCAACTTGGCT
AGTGGAGTACCTTCACGCTTTAGTGGGTCAGGTTCTGGAACAGATTTTACGTTGACGATCTCCGATTTGGAACCAGG
GGACGCTGCCACGTATTATTGCCAGTCCACCTACCTCGGGACTGACTACGTTGGTGGGGCGTTTGGCGGAGGAACAA
AACTCACTGTACTTGGTGGTGGTGGTTCAGGCGGGGGGGGTTCCGGCGGAGGCGGTTCTGGGGGTGGAGGTTCCGAG
GTTCAGTTGGTTGAAAGTGGGGGGGGACTCGTTCAGCCTGGAGGCTCTTTGCGACTTTCTTGTACCGCTTCTGGGTT
CACTATAAGTTCATATCATATGCAATGGGTAAGACAGGCGCCTGGTAAGGGACTTGAATACATAGGAACAATAAGCT
CTGGTGGTAACGTCTATTACGCCTCATCCGCGCGGGGGAGGTTTACAATTTCCAGGCCTTCTAGCAAAAACACGGTA
GATCTGCAAATGAACTCTCTTCGCGCTGAAGATACAGCAGTCTACTACTGCGCCAGGGATTCAGGGTATTCTGACCC
CATGTGGGGGCAGGGCACATTGGTTACCGTGTCCTCTTGA
>Sequence ID 71: SI-68P13 Chain B Amino Acid Sequence
ENVLTQSPASLSASPGERVTITCSASSSVSYMHWYQQKPGQAPKLWIYDTSKLASGVPSRFSGSGSGNDHTLTISSM
EPEDFATYYCFQGSVYPFTFGQGTKVTVLGGGGSGGGGSGGGGSGGGGSQVTLKESGPGLVQPGQTLSLTCAFSGFS
LSTSGMGVGWIRQPPGKGLEWLAHIWWDDDKRYNPALKSRLTISKDTSKNQVYLQMNSLDAEDTAVYYCARMELWSY
YFDYWGQGTLVTVSSGGGGSGGGGSDVVMTQSPSTLSASVGDRVTINCQASESISSWLAWYQQKPGKAPKLLIYEAS
KLASGVPSRFSGSGSGTEFTLTISSLQPDDFATYYCQGYFYFISRTYVNSFGGGTKVEIKRTVAAPSVFIFPPSDEQ
LKSGTASVVCLLNNFYPREAKVQWKVDNALQSGNSQESVTEQDSKDSTYSLSSTLTLSKADYEKHKVYACEVTHQGL
SSPVTKSFNRGECGGDKTHTCPPCPAPEAAGGPSVFLFPPKPKDTLMISRTPEVTCVVVDVSHEDPEVKFNWYVDGV
EVHNAKTKPREEQYNSTYRVVSVLTVLHQDWLNGKEYKCAVSNKALPAPIEKTISKAKGQPREPQVYTLPPSRDELT
KNQVSLWCLVKGFYPSDIAVEWESNGQPENNYKTTPPVLDSDGSFFLYSKLTVDKSRWQQGNVFSCSVMHEALHNRF
TQKSLSLSPGGGGGSGGGGSDIQMTQSPSTLSASVGDRVTITCQASQSISSHLNWYQQKPGKAPKLLIYKASTLASG
VPSRFSGSGSGTEFTLTISSLQPDDFATYYCQQGYSWGNVDNVFGGGTKVTVLGGGGSGGGGSGGGGSGGGGSEVQL
LESGGGLVQPGGSLSLSCAASGFSFSSGYDMCWVRQAPGKGLEWIACIAAGSAGITYDANWAKGRFTISRDNSKNTL
YLQMNSLRAEDTAVYYCARSAFSFDYAMDLWGQGTLVTVSS
>Sequence ID 72: SI-68P13 Chain B Nucleotide Sequence
GAAAATGTATTGACACAGAGCCCCGCCTCCCTCAGTGCCTCACCTGGGGAAAGGGTAACTATCACTTGCTCTGCATC
AAGCAGCGTCTCATACATGCATTGGTATCAACAAAAGCCTGGACAGGCCCCCAAGCTCTGGATATACGATACGAGCA
AGCTGGCTTCCGGCGTACCTAGCCGCTTCAGTGGTTCCGGCTCAGGCAACGATCACACCCTTACGATTTCCAGTATG
GAACCCGAAGATTTTGCAACTTATTATTGTTTCCAGGGGAGCGTGTACCCATTCACTTTCGGGCAGGGGACAAAAGT
GACCGTCCTAGGCGGTGGCGGTAGTGGGGGAGGCGGTTCTGGCGGCGGAGGGTCCGGCGGTGGAGGATCACAGGTCA
CATTGAAGGAATCTGGCCCCGGCCTTGTTCAGCCAGGACAGACCCTTAGCCTCACCTGTGCCTTCAGTGGTTTTTCT
CTTAGCACTAGCGGTATGGGGGTCGGCTGGATTCGGCAGCCTCCCGGCAAAGGTCTTGAGTGGTTGGCTCACATTTG
GTGGGACGACGACAAACGGTATAATCCTGCCTTGAAAAGTCGGCTGACCATTAGTAAGGATACCTCAAAAAATCAAG
TGTACTTGCAAATGAATAGCCTTGACGCCGAGGATACGGCTGTATATTATTGCGCGCGGATGGAACTCTGGTCTTAC
TACTTTGATTATTGGGGGCAGGGGACTCTCGTCACGGTCTCGAGCGGCGGTGGAGGGTCCGGCGGTGGTGGATCAGA
CGTCGTGATGACCCAGTCTCCTTCCACCCTGTCTGCATCTGTAGGAGACAGAGTCACCATCAATTGCCAAGCCAGTG
AGAGCATTAGCAGTTGGTTAGCCTGGTATCAGCAGAAACCAGGGAAAGCCCCTAAGCTCCTGATCTATGAAGCATCC
AAACTGGCATCTGGGGTCCCATCAAGGTTCAGCGGCAGTGGATCTGGGACAGAATTCACTCTCACCATCAGCAGCCT
GCAGCCTGATGATTTTGCAACTTATTACTGCCAAGGCTATTTTTATTTTATTAGTCGTACTTATGTAAATTCTTTCG
GCGGAGGGACCAAGGTGGAGATCAAACGTACGGTGGCTGCACCATCTGTCTTCATCTTCCCGCCATCTGATGAGCAG
TTGAAATCTGGAACTGCCTCTGTTGTGTGCCTGCTGAATAACTTCTATCCCAGAGAGGCCAAAGTACAGTGGAAGGT
GGATAACGCCCTCCAATCGGGTAACTCCCAGGAGAGTGTCACAGAGCAGGACAGCAAGGACAGCACCTACAGCCTCA
GCAGCACCCTGACGCTGAGCAAAGCAGACTACGAGAAACACAAAGTCTACGCCTGCGAAGTCACCCATCAGGGCCTG
AGCTCGCCCGTCACAAAGAGCTTCAACAGGGGAGAGTGTGGAGGCGACAAAACTCACACATGCCCACCGTGCCCAGC
ACCTGAAGCCGCGGGGGGACCGTCAGTCTTCCTCTTCCCCCCAAAACCCAAGGACACCCTCATGATCTCCCGGACCC
CTGAGGTCACATGCGTGGTGGTGGACGTGAGCCACGAAGACCCTGAGGTCAAGTTCAACTGGTACGTGGACGGCGTG
GAGGTGCATAATGCCAAGACAAAGCCGCGGGAGGAGCAGTACAACAGCACGTACCGTGTGGTCAGCGTCCTCACCGT
CCTGCACCAGGACTGGCTGAATGGCAAGGAGTACAAGTGCGCGGTCTCCAACAAAGCCCTCCCAGCCCCCATCGAGA
AAACCATCTCCAAAGCCAAAGGGCAGCCCCGAGAACCACAGGTGTACACCCTGCCCCCAAGCCGGGATGAGCTGACC
AAGAACCAGGTCAGCCTGTGGTGCCTGGTCAAAGGCTTCTATCCCAGCGACATCGCCGTGGAGTGGGAGAGCAATGG
GCAGCCGGAGAACAACTACAAGACCACGCCTCCCGTGCTGGACTCCGACGGCTCCTTCTTCCTCTATAGCAAGCTCA
CCGTGGACAAGAGCAGGTGGCAGCAGGGGAACGTCTTCTCATGCTCCGTGATGCATGAGGCTCTGCACAACAGATTC
ACGCAGAAGAGCCTCTCCCTGTCTCCGGGTGGCGGTGGAGGGTCCGGCGGTGGTGGATCCGACATTCAGATGACACA
GTCACCGTCTACGCTCTCAGCCTCAGTAGGCGATAGGGTGACTATCACCTGCCAAGCCTCCCAATCTATAAGTTCAC
ACCTCAACTGGTATCAACAGAAACCCGGTAAAGCACCGAAGCTGCTCATCTACAAGGCATCAACTCTTGCCTCAGGT
GTGCCTAGTCGCTTCTCCGGGAGCGGCTCCGGTACTGAGTTTACTTTGACGATATCTTCCCTCCAACCCGACGACTT
CGCCACATACTATTGTCAGCAGGGTTATAGTTGGGGAAATGTTGACAATGTGTTTGGAGGGGGAACGAAAGTGACTG
TGTTGGGAGGGGGAGGAAGTGGCGGCGGCGGAAGCGGAGGTGGTGGCTCCGGCGGGGGTGGAAGCGAAGTGCAATTG
CTCGAAAGTGGTGGCGGACTTGTGCAACCTGGTGGAAGCCTCTCACTCTCTTGCGCGGCGAGTGGTTTTAGCTTCAG
TAGCGGCTACGATATGTGCTGGGTAAGACAGGCTCCTGGTAAAGGCCTTGAGTGGATTGCGTGTATCGCCGCCGGGT
CTGCTGGTATAACATACGATGCAAACTGGGCGAAAGGGCGCTTCACAATCTCCAGGGACAACTCAAAAAATACATTG
TACCTCCAGATGAATAGCCTGAGAGCCGAAGACACCGCAGTCTACTATTGCGCAAGGTCAGCATTTAGCTTCGATTA
TGCAATGGATCTTTGGGGCCAGGGGACGCTCGTCACCGTCTCATCTTGA
>Sequence ID 73: SI-68P17 Chain A Amino Acid Sequence
DVVMTQSPSTLSASVGDRVTINCQASESISSWLAWYQQKPGKAPKLLIYEASKLASGVPSRFSGSGSGTEFTLTISS
LQPDDFATYYCQGYFYFISRTYVNSFGGGTKVEIKGGGGSGGGGSGGGGSGGGGSEVQLVESGGGLVQPGGSLRLSC
AASGFTISTNAMSWVRQAPGKGLEWIGVITGRDITYYASWAKGRFTISRDNSKNTLYLQMNSLRAEDTAVYYCARDG
GSSAITSNNIWGQGTLVTVSSGGGGSGGGGSQVQLQQSGPGLVKPSETLSITCTVSGFSLTNYGVHWIRQAPGKGLE
WLGVIWSGGNTDYNTPFTSRFTITKDNSKNQVYFKLRSVRADDTAIYYCARALTYYDYEFAYWGQGTLVTVSSASTK
GPSVFPLAPSSKSTSGGTAALGCLVKDYFPEPVTVSWNSGALTSGVHTFPAVLQSSGLYSLSSVVTVPSSSLGTQTY
ICNVNHKPSNTKVDKRVEPKSCDKTHTCPPCPAPEAAGGPSVFLFPPKPKDTLMISRTPEVTCVVVDVSHEDPEVKF
NWYVDGVEVHNAKTKPREEQYNSTYRVVSVLTVLHQDWLNGKEYKCAVSNKALPAPIEKTISKAKGQPREPQVYTLP
PSRDELTKNQVSLSCAVKGFYPSDIAVEWESNGQPENNYKTTPPVLDSDGSFFLVSKLTVDKSRWQQGNVFSCSVMH
EALHNHYTQKSLSLSPGGGGGSGGGGSDVVMTQSPSSVSASVGDRVTITCQASQNIRTYLSWYQQKPGKAPKLLIYA
AANLASGVPSRFSGSGSGTDFTLTISDLEPGDAATYYCQSTYLGTDYVGGAFGGGTKLTVLGGGGSGGGGSGGGGSG
GGGSEVQLVESGGGLVQPGGSLRLSCTASGFTISSYHMQWVRQAPGKGLEYIGTISSGGNVYYASSARGRFTISRPS
SKNTVDLQMNSLRAEDTAVYYCARDSGYSDPMWGQGTLVTVSS
>Sequence ID 74: SI-68P17 Chain A Nucleotide Sequence
GACGTCGTGATGACCCAGTCTCCTTCCACCCTGTCTGCATCTGTAGGAGACAGAGTCACCATCAATTGCCAAGCCAG
TGAGAGCATTAGCAGTTGGTTAGCCTGGTATCAGCAGAAACCAGGGAAAGCCCCTAAGCTCCTGATCTATGAAGCAT
CCAAACTGGCATCTGGGGTCCCATCAAGGTTCAGCGGCAGTGGATCTGGGACAGAATTTACTCTCACCATCAGCAGC
CTGCAGCCTGATGATTTTGCAACTTATTACTGCCAAGGCTATTTTTATTTTATTAGTCGTACTTATGTAAATTCTTT
CGGCGGAGGGACCAAGGTGGAGATCAAAGGCGGTGGCGGTAGTGGGGGAGGCGGTTCTGGCGGCGGAGGGTCCGGCG
GTGGAGGATCAGAGGTGCAGCTGGTGGAGTCTGGGGGAGGCTTGGTCCAGCCTGGGGGGTCCCTGAGACTCTCCTGT
GCAGCCTCTGGATTCACCATCAGTACCAATGCAATGAGCTGGGTCCGCCAGGCTCCAGGGAAGGGGCTGGAGTGGAT
CGGAGTCATTACTGGTCGTGATATCACATACTACGCGAGCTGGGCGAAAGGCAGATTCACCATCTCCAGAGACAATT
CCAAGAACACGCTGTATCTTCAAATGAACAGCCTGAGAGCCGAGGACACGGCTGTGTATTACTGTGCGAGAGACGGT
GGTTCTTCTGCTATTACTAGTAACAACATTTGGGGCCAGGGAACCCTGGTCACCGTCTCGAGTGGCGGTGGAGGGTC
CGGCGGTGGTGGATCACAAGTACAGTTGCAGCAATCCGGTCCCGGTCTCGTCAAACCGAGTGAGACGCTTAGTATAA
CGTGTACTGTTTCAGGCTTTAGCCTTACGAACTATGGAGTTCACTGGATTCGGCAGGCACCCGGCAAAGGTTTGGAA
TGGCTGGGTGTTATTTGGTCAGGTGGAAATACAGACTATAACACCCCCTTTACAAGTCGGTTCACAATTACGAAAGA
TAATTCCAAAAATCAAGTTTATTTCAAGTTGAGATCCGTCCGCGCGGACGACACTGCGATCTACTATTGTGCGAGGG
CACTGACCTACTACGATTACGAATTTGCGTATTGGGGGCAAGGGACTCTTGTAACAGTCTCCAGTGCTAGCACCAAG
GGCCCATCGGTCTTCCCCCTGGCACCCTCCTCCAAGAGCACCTCTGGGGGCACAGCGGCCCTGGGCTGCCTGGTCAA
GGACTACTTCCCCGAACCGGTGACGGTGTCGTGGAACTCAGGCGCCCTGACCAGCGGCGTGCACACCTTCCCGGCTG
TCCTACAGTCCTCAGGACTCTACTCCCTCAGCAGCGTGGTGACCGTGCCCTCCAGCAGCTTGGGCACCCAGACCTAC
ATCTGCAACGTGAATCACAAGCCCAGCAACACCAAGGTGGACAAGAGAGTTGAGCCCAAATCTTGTGACAAAACTCA
CACATGCCCACCGTGCCCAGCACCTGAAGCCGCGGGGGGACCGTCAGTCTTCCTCTTCCCCCCAAAACCCAAGGACA
CCCTCATGATCTCCCGGACCCCTGAGGTCACATGCGTGGTGGTGGACGTGAGCCACGAAGACCCTGAGGTCAAGTTC
AACTGGTACGTGGACGGCGTGGAGGTGCATAATGCCAAGACAAAGCCGCGGGAGGAGCAGTACAACAGCACGTACCG
TGTGGTCAGCGTCCTCACCGTCCTGCACCAGGACTGGCTGAATGGCAAGGAGTACAAGTGCGCGGTCTCCAACAAAG
CCCTCCCAGCCCCCATCGAGAAAACCATCTCCAAAGCCAAAGGGCAGCCCCGAGAACCACAGGTGTATACCCTGCCC
CCATCCCGGGATGAGCTGACCAAGAACCAGGTCAGCCTGTCCTGCGCCGTCAAAGGCTTCTATCCCAGCGACATCGC
CGTGGAGTGGGAGAGCAATGGGCAGCCGGAGAACAACTACAAGACCACGCCTCCCGTGCTGGACTCCGACGGCTCCT
TCTTCCTCGTGAGCAAGCTCACCGTGGACAAGAGCAGGTGGCAGCAGGGGAACGTCTTCTCATGCTCCGTGATGCAT
GAGGCTCTGCACAACCACTACACGCAGAAGAGCCTCTCCCTGTCTCCGGGTGGCGGCGGCGGTTCAGGTGGTGGGGG
ATCCGACGTTGTGATGACGCAGTCTCCTAGTTCAGTATCAGCGTCTGTTGGGGATCGAGTCACGATTACATGCCAGG
CGAGCCAAAATATTAGGACGTATCTGTCTTGGTATCAACAAAAGCCTGGTAAGGCTCCAAAACTCCTCATTTACGCC
GCTGCCAACTTGGCTAGTGGAGTACCTTCACGCTTTAGTGGGTCAGGTTCTGGAACAGATTTTACGTTGACGATCTC
CGATTTGGAACCAGGGGACGCTGCCACGTATTATTGCCAGTCCACCTACCTCGGGACTGACTACGTTGGTGGGGCGT
TTGGCGGAGGAACAAAACTCACTGTACTTGGTGGTGGTGGTTCAGGCGGGGGGGGTTCCGGCGGAGGCGGTTCTGGG
GGTGGAGGTTCCGAGGTTCAGTTGGTTGAAAGTGGGGGGGGACTCGTTCAGCCTGGAGGCTCTTTGCGACTTTCTTG
TACCGCTTCTGGGTTCACTATAAGTTCATATCATATGCAATGGGTAAGACAGGCGCCTGGTAAGGGACTTGAATACA
TAGGAACAATAAGCTCTGGTGGTAACGTCTATTACGCCTCATCCGCGCGGGGGAGGTTTACAATTTCCAGGCCTTCT
AGCAAAAACACGGTAGATCTGCAAATGAACTCTCTTCGCGCTGAAGATACAGCAGTCTACTACTGCGCCAGGGATTC
AGGGTATTCTGACCCCATGTGGGGGCAGGGCACATTGGTTACCGTGTCCTCTTGA
>Sequence ID 75: SI-68P17 Chain B Amino Acid Sequence
ENVLTQSPASLSASPGERVTITCSASSSVSYMHWYQQKPGQAPKLWIYDTSKLASGVPSRFSGSGSGNDHTLTISSM
EPEDFATYYCFQGSVYPFTFGQGTKVTVLGGGGSGGGGSGGGGSGGGGSQVTLKESGPGLVQPGQTLSLTCAFSGFS
LSTSGMGVGWIRQPPGKGLEWLAHIWWDDDKRYNPALKSRLTISKDTSKNQVYLQMNSLDAEDTAVYYCARMELWSY
YFDYWGQGTLVTVSSGGGGSGGGGSEIVLTQSPSTLSVSPGERATFSCRASQSIGTNIHWYQQKPGKPPRLLIKYAS
ESISGIPDRFSGSGSGTEFTLTISSVQSEDFAVYYCQQNNNWPTTFGPGTKLTVLRTVAAPSVFIFPPSDEQLKSGT
ASVVCLLNNFYPREAKVQWKVDNALQSGNSQESVTEQDSKDSTYSLSSTLTLSKADYEKHKVYACEVTHQGLSSPVT
KSFNRGECGGDKTHTCPPCPAPEAAGGPSVFLFPPKPKDTLMISRTPEVTCVVVDVSHEDPEVKFNWYVDGVEVHNA
KTKPREEQYNSTYRVVSVLTVLHQDWLNGKEYKCAVSNKALPAPIEKTISKAKGQPREPQVYTLPPSRDELTKNQVS
LWCLVKGFYPSDIAVEWESNGQPENNYKTTPPVLDSDGSFFLYSKLTVDKSRWQQGNVFSCSVMHEALHNRFTQKSL
SLSPGGGGGSGGGGSDIQMTQSPSTLSASVGDRVTITCQASQSISSHLNWYQQKPGKAPKLLIYKASTLASGVPSRF
SGSGSGTEFTLTISSLQPDDFATYYCQQGYSWGNVDNVFGGGTKVTVLGGGGSGGGGSGGGGSGGGGSEVQLLESGG
GLVQPGGSLSLSCAASGFSFSSGYDMCWVRQAPGKGLEWIACIAAGSAGITYDANWAKGRFTISRDNSKNTLYLQMN
SLRAEDTAVYYCARSAFSFDYAMDLWGQGTLVTVSS
>Sequence ID 76: SI-68P17 Chain B Nucleotide Sequence
GAAAATGTATTGACACAGAGCCCCGCCTCCCTCAGTGCCTCACCTGGGGAAAGGGTAACTATCACTTGCTCTGCATC
AAGCAGCGTCTCATACATGCATTGGTATCAACAAAAGCCTGGACAGGCCCCCAAGCTCTGGATATACGATACGAGCA
AGCTGGCTTCCGGCGTACCTAGCCGCTTCAGTGGTTCCGGCTCAGGCAACGATCACACCCTTACGATTTCCAGTATG
GAACCCGAAGATTTTGCAACTTATTATTGTTTCCAGGGGAGCGTGTACCCATTCACTTTCGGGCAGGGGACAAAAGT
GACCGTCCTAGGCGGTGGCGGTAGTGGGGGAGGCGGTTCTGGCGGCGGAGGGTCCGGCGGTGGAGGATCACAGGTCA
CATTGAAGGAATCTGGCCCCGGCCTTGTTCAGCCAGGACAGACCCTTAGCCTCACCTGTGCCTTCAGTGGTTTTTCT
CTTAGCACTAGCGGTATGGGGGTCGGCTGGATTCGGCAGCCTCCCGGCAAAGGTCTTGAGTGGTTGGCTCACATTTG
GTGGGACGACGACAAACGGTATAATCCTGCCTTGAAAAGTCGGCTGACCATTAGTAAGGATACCTCAAAAAATCAAG
TGTACTTGCAAATGAATAGCCTTGACGCCGAGGATACGGCTGTATATTATTGCGCGCGGATGGAACTCTGGTCTTAC
TACTTTGATTATTGGGGGCAGGGGACTCTCGTCACGGTCTCGAGTGGCGGTGGAGGGTCCGGCGGTGGTGGATCAGA
AATCGTCCTTACACAATCTCCTAGCACACTGAGTGTGAGCCCCGGCGAACGCGCGACTTTCTCTTGCAGGGCAAGTC
AATCCATAGGGACTAATATACATTGGTATCAACAAAAGCCAGGTAAACCACCCAGGCTTTTGATTAAGTATGCAAGT
GAGTCTATTTCCGGTATCCCTGACCGCTTCTCTGGATCAGGCAGTGGCACAGAGTTCACACTCACCATATCTAGTGT
GCAATCAGAGGACTTCGCCGTGTATTACTGCCAACAGAATAATAACTGGCCGACTACCTTCGGACCCGGTACAAAGC
TGACCGTTTTACGTACGGTGGCTGCACCATCTGTCTTCATCTTCCCGCCATCTGATGAGCAGTTGAAATCTGGAACT
GCCTCTGTTGTGTGCCTGCTGAATAACTTCTATCCCAGAGAGGCCAAAGTACAGTGGAAGGTGGATAACGCCCTCCA
ATCGGGTAACTCCCAGGAGAGTGTCACAGAGCAGGACAGCAAGGACAGCACCTACAGCCTCAGCAGCACCCTGACGC
TGAGCAAAGCAGACTACGAGAAACACAAAGTCTACGCCTGCGAAGTCACCCATCAGGGCCTGAGCTCGCCCGTCACA
AAGAGCTTCAACAGGGGAGAGTGTGGAGGCGACAAAACTCACACATGCCCACCGTGCCCAGCACCTGAAGCCGCGGG
GGGACCGTCAGTCTTCCTCTTCCCCCCAAAACCCAAGGACACCCTCATGATCTCCCGGACCCCTGAGGTCACATGCG
TGGTGGTGGACGTGAGCCACGAAGACCCTGAGGTCAAGTTCAACTGGTACGTGGACGGCGTGGAGGTGCATAATGCC
AAGACAAAGCCGCGGGAGGAGCAGTACAACAGCACGTACCGTGTGGTCAGCGTCCTCACCGTCCTGCACCAGGACTG
GCTGAATGGCAAGGAGTACAAGTGCGCGGTCTCCAACAAAGCCCTCCCAGCCCCCATCGAGAAAACCATCTCCAAAG
CCAAAGGGCAGCCCCGAGAACCACAGGTGTACACCCTGCCCCCAAGCCGGGATGAGCTGACCAAGAACCAGGTCAGC
CTGTGGTGCCTGGTCAAAGGCTTCTATCCCAGCGACATCGCCGTGGAGTGGGAGAGCAATGGGCAGCCGGAGAACAA
CTACAAGACCACGCCTCCCGTGCTGGACTCCGACGGCTCCTTCTTCCTCTATAGCAAGCTCACCGTGGACAAGAGCA
GGTGGCAGCAGGGGAACGTCTTCTCATGCTCCGTGATGCATGAGGCTCTGCACAACAGATTCACGCAGAAGAGCCTC
TCCCTGTCTCCGGGTGGCGGTGGAGGGTCCGGCGGTGGTGGATCCGACATTCAGATGACACAGTCACCGTCTACGCT
CTCAGCCTCAGTAGGCGATAGGGTGACTATCACCTGCCAAGCCTCCCAATCTATAAGTTCACACCTCAACTGGTATC
AACAGAAACCCGGTAAAGCACCGAAGCTGCTCATCTACAAGGCATCAACTCTTGCCTCAGGTGTGCCTAGTCGCTTC
TCCGGGAGCGGCTCCGGTACTGAGTTTACTTTGACGATATCTTCCCTCCAACCCGACGACTTCGCCACATACTATTG
TCAGCAGGGTTATAGTTGGGGAAATGTTGACAATGTGTTTGGAGGGGGAACGAAAGTGACTGTGTTGGGAGGGGGAG
GAAGTGGCGGCGGCGGAAGCGGAGGTGGTGGCTCCGGCGGGGGTGGAAGCGAAGTGCAATTGCTCGAAAGTGGTGGC
GGACTTGTGCAACCTGGTGGAAGCCTCTCACTCTCTTGCGCGGCGAGTGGTTTTAGCTTCAGTAGCGGCTACGATAT
GTGCTGGGTAAGACAGGCTCCTGGTAAAGGCCTTGAGTGGATTGCGTGTATCGCCGCCGGGTCTGCTGGTATAACAT
ACGATGCAAACTGGGCGAAAGGGCGCTTCACAATCTCCAGGGACAACTCAAAAAATACATTGTACCTCCAGATGAAT
AGCCTGAGAGCCGAAGACACCGCAGTCTACTATTGCGCAAGGTCAGCATTTAGCTTCGATTATGCAATGGATCTTTG
GGGCCAGGGGACGCTCGTCACCGTCTCATCTTGA
>Sequence ID 77: SI-68P15 Chain A Amino Acid Sequence
EIVMTQSPSTLSASVGDRVIITCQASESISSWLAWYQQKPGKAPKLLIYEASKLASGVPSRFSGSGSGAEFTLTISS
LQPDDFATYYCQGYFYFISRTYVNSFGQGTKLTVLGGGGSGGGGSGGGGSGGGGSEVQLVESGGGLVQPGGSLRLSC
AASGFTISTNAMSWVRQAPGKGLEWVGVITGRDITYYASWAKGRFTISRDTSKNTVYLQMNSLRAEDTAVYYCARDG
GSSAITSNNIWGQGTLVTVSSGGGGSGGGGSQVQLQQSGPGLVKPSETLSITCTVSGFSLTNYGVHWIRQAPGKGLE
WLGVIWSGGNTDYNTPFTSRFTITKDNSKNQVYFKLRSVRADDTAIYYCARALTYYDYEFAYWGQGTLVTVSSASTK
GPSVFPLAPSSKSTSGGTAALGCLVKDYFPEPVTVSWNSGALTSGVHTFPAVLQSSGLYSLSSVVTVPSSSLGTQTY
ICNVNHKPSNTKVDKRVEPKSCDKTHTCPPCPAPEAAGGPSVFLFPPKPKDTLMISRTPEVTCVVVDVSHEDPEVKF
NWYVDGVEVHNAKTKPREEQYNSTYRVVSVLTVLHQDWLNGKEYKCAVSNKALPAPIEKTISKAKGQPREPQVYTLP
PSRDELTKNQVSLSCAVKGFYPSDIAVEWESNGQPENNYKTTPPVLDSDGSFFLVSKLTVDKSRWQQGNVFSCSVMH
EALHNHYTQKSLSLSPGGGGGSGGGGSDVVMTQSPSSVSASVGDRVTITCQASQNIRTYLSWYQQKPGKAPKLLIYA
AANLASGVPSRFSGSGSGTDFTLTISDLEPGDAATYYCQSTYLGTDYVGGAFGGGTKLTVLGGGGSGGGGSGGGGSG
GGGSEVQLVESGGGLVQPGGSLRLSCTASGFTISSYHMQWVRQAPGKGLEYIGTISSGGNVYYASSARGRFTISRPS
SKNTVDLQMNSLRAEDTAVYYCARDSGYSDPMWGQGTLVTVSS
>Sequence ID 78: SI-68P15 Chain A Nucleotide Sequence
GAAATCGTTATGACGCAGAGTCCCTCCACGCTCTCCGCTAGTGTCGGGGATCGCGTCATTATCACATGCCAGGCCTC
CGAGTCAATCAGCAGCTGGCTTGCATGGTATCAACAGAAGCCGGGAAAAGCTCCTAAATTGCTGATCTATGAAGCGT
CAAAATTGGCGTCTGGTGTCCCATCTAGGTTCTCCGGCTCTGGGTCTGGTGCGGAATTTACTTTGACAATCTCCAGT
CTTCAACCAGACGATTTCGCTACCTACTACTGCCAAGGGTATTTCTATTTTATAAGCCGGACATATGTAAACTCCTT
CGGCCAAGGAACAAAGTTGACTGTTCTTGGTGGCGGAGGCAGTGGTGGCGGGGGCAGCGGAGGTGGTGGTTCAGGGG
GTGGTGGGAGCGAAGTCCAATTGGTAGAAAGTGGCGGTGGTCTGGTGCAACCTGGTGGATCTCTTCGCCTCTCATGC
GCCGCTAGTGGCTTTACTATTTCAACTAATGCGATGAGCTGGGTTCGCCAGGCCCCCGGCAAAGGACTTGAGTGGGT
CGGCGTCATCACCGGCAGGGACATTACATACTATGCGAGTTGGGCAAAGGGCAGGTTCACGATTAGCCGCGATACTT
CAAAGAATACCGTTTACCTTCAAATGAATAGCTTGAGGGCGGAAGACACAGCTGTGTATTACTGCGCGAGGGATGGA
GGTAGTTCCGCCATAACTTCCAACAACATATGGGGACAAGGCACGCTGGTTACTGTCTCGAGTGGCGGTGGAGGGTC
CGGCGGTGGTGGATCACAAGTACAGTTGCAGCAATCCGGTCCCGGTCTCGTCAAACCGAGTGAGACGCTTAGTATAA
CGTGTACTGTTTCAGGCTTTAGCCTTACGAACTATGGAGTTCACTGGATTCGGCAGGCACCCGGCAAAGGTTTGGAA
TGGCTGGGTGTTATTTGGTCAGGTGGAAATACAGACTATAACACCCCCTTTACAAGTCGGTTCACAATTACGAAAGA
TAATTCCAAAAATCAAGTTTATTTCAAGTTGAGATCCGTCCGCGCGGACGACACTGCGATCTACTATTGTGCGAGGG
CACTGACCTACTACGATTACGAATTTGCGTATTGGGGGCAAGGGACTCTTGTAACAGTCTCCAGTGCTAGCACCAAG
GGCCCATCGGTCTTCCCCCTGGCACCCTCCTCCAAGAGCACCTCTGGGGGCACAGCGGCCCTGGGCTGCCTGGTCAA
GGACTACTTCCCCGAACCGGTGACGGTGTCGTGGAACTCAGGCGCCCTGACCAGCGGCGTGCACACCTTCCCGGCTG
TCCTACAGTCCTCAGGACTCTACTCCCTCAGCAGCGTGGTGACCGTGCCCTCCAGCAGCTTGGGCACCCAGACCTAC
ATCTGCAACGTGAATCACAAGCCCAGCAACACCAAGGTGGACAAGAGAGTTGAGCCCAAATCTTGTGACAAAACTCA
CACATGCCCACCGTGCCCAGCACCTGAAGCCGCGGGGGGACCGTCAGTCTTCCTCTTCCCCCCAAAACCCAAGGACA
CCCTCATGATCTCCCGGACCCCTGAGGTCACATGCGTGGTGGTGGACGTGAGCCACGAAGACCCTGAGGTCAAGTTC
AACTGGTACGTGGACGGCGTGGAGGTGCATAATGCCAAGACAAAGCCGCGGGAGGAGCAGTACAACAGCACGTACCG
TGTGGTCAGCGTCCTCACCGTCCTGCACCAGGACTGGCTGAATGGCAAGGAGTACAAGTGCGCGGTCTCCAACAAAG
CCCTCCCAGCCCCCATCGAGAAAACCATCTCCAAAGCCAAAGGGCAGCCCCGAGAACCACAGGTGTATACCCTGCCC
CCATCCCGGGATGAGCTGACCAAGAACCAGGTCAGCCTGTCCTGCGCCGTCAAAGGCTTCTATCCCAGCGACATCGC
CGTGGAGTGGGAGAGCAATGGGCAGCCGGAGAACAACTACAAGACCACGCCTCCCGTGCTGGACTCCGACGGCTCCT
TCTTCCTCGTGAGCAAGCTCACCGTGGACAAGAGCAGGTGGCAGCAGGGGAACGTCTTCTCATGCTCCGTGATGCAT
GAGGCTCTGCACAACCACTACACGCAGAAGAGCCTCTCCCTGTCTCCGGGTGGCGGCGGCGGTTCAGGTGGTGGGGG
ATCCGACGTTGTGATGACGCAGTCTCCTAGTTCAGTATCAGCGTCTGTTGGGGATCGAGTCACGATTACATGCCAGG
CGAGCCAAAATATTAGGACGTATCTGTCTTGGTATCAACAAAAGCCTGGTAAGGCTCCAAAACTCCTCATTTACGCC
GCTGCCAACTTGGCTAGTGGAGTACCTTCACGCTTTAGTGGGTCAGGTTCTGGAACAGATTTTACGTTGACGATCTC
CGATTTGGAACCAGGGGACGCTGCCACGTATTATTGCCAGTCCACCTACCTCGGGACTGACTACGTTGGTGGGGCGT
TTGGCGGAGGAACAAAACTCACTGTACTTGGTGGTGGTGGTTCAGGCGGGGGGGGTTCCGGCGGAGGCGGTTCTGGG
GGTGGAGGTTCCGAGGTTCAGTTGGTTGAAAGTGGGGGGGGACTCGTTCAGCCTGGAGGCTCTTTGCGACTTTCTTG
TACCGCTTCTGGGTTCACTATAAGTTCATATCATATGCAATGGGTAAGACAGGCGCCTGGTAAGGGACTTGAATACA
TAGGAACAATAAGCTCTGGTGGTAACGTCTATTACGCCTCATCCGCGCGGGGGAGGTTTACAATTTCCAGGCCTTCT
AGCAAAAACACGGTAGATCTGCAAATGAACTCTCTTCGCGCTGAAGATACAGCAGTCTACTACTGCGCCAGGGATTC
AGGGTATTCTGACCCCATGTGGGGGCAGGGCACATTGGTTACCGTGTCCTCTTGA
>Sequence ID 79: SI-68P15 Chain B Amino Acid Sequence
ENVLTQSPASLSASPGERVTITCSASSSVSYMHWYQQKPGQAPKLWIYDTSKLASGVPSRFSGSGSGNDHTLTISSM
EPEDFATYYCFQGSVYPFTFGQGTKVTVLGGGGSGGGGSGGGGSGGGGSQVTLKESGPGLVQPGQTLSLTCAFSGFS
LSTSGMGVGWIRQPPGKGLEWLAHIWWDDDKRYNPALKSRLTISKDTSKNQVYLQMNSLDAEDTAVYYCARMELWSY
YFDYWGQGTLVTVSSGGGGSGGGGSEIVLTQSPSTLSVSPGERATFSCRASQSIGTNIHWYQQKPGKPPRLLIKYAS
ESISGIPDRFSGSGSGTEFTLTISSVQSEDFAVYYCQQNNNWPTTFGPGTKLTVLRTVAAPSVFIFPPSDEQLKSGT
ASVVCLLNNFYPREAKVQWKVDNALQSGNSQESVTEQDSKDSTYSLSSTLTLSKADYEKHKVYACEVTHQGLSSPVT
KSFNRGECGGDKTHTCPPCPAPEAAGGPSVFLFPPKPKDTLMISRTPEVTCVVVDVSHEDPEVKFNWYVDGVEVHNA
KTKPREEQYNSTYRVVSVLTVLHQDWLNGKEYKCAVSNKALPAPIEKTISKAKGQPREPQVYTLPPSRDELTKNQVS
LWCLVKGFYPSDIAVEWESNGQPENNYKTTPPVLDSDGSFFLYSKLTVDKSRWQQGNVFSCSVMHEALHNRFTQKSL
SLSPGGGGGSGGGGSDIQMTQSPSTLSASVGDRVTITCQASQSISSHLNWYQQKPGKAPKLLIYKASTLASGVPSRF
SGSGSGTEFTLTISSLQPDDFATYYCQQGYSWGNVDNVFGGGTKVTVLGGGGSGGGGSGGGGSGGGGSEVQLLESGG
GLVQPGGSLSLSCAASGFSFSSGYDMCWVRQAPGKGLEWIACIAAGSAGITYDANWAKGRFTISRDNSKNTLYLQMN
SLRAEDTAVYYCARSAFSFDYAMDLWGQGTLVTVSS
>Sequence ID 80: SI-68P15 Chain B Nucleotide Sequence
GAAAATGTATTGACACAGAGCCCCGCCTCCCTCAGTGCCTCACCTGGGGAAAGGGTAACTATCACTTGCTCTGCATC
AAGCAGCGTCTCATACATGCATTGGTATCAACAAAAGCCTGGACAGGCCCCCAAGCTCTGGATATACGATACGAGCA
AGCTGGCTTCCGGCGTACCTAGCCGCTTCAGTGGTTCCGGCTCAGGCAACGATCACACCCTTACGATTTCCAGTATG
GAACCCGAAGATTTTGCAACTTATTATTGTTTCCAGGGGAGCGTGTACCCATTCACTTTCGGGCAGGGGACAAAAGT
GACCGTCCTAGGCGGTGGCGGTAGTGGGGGAGGCGGTTCTGGCGGCGGAGGGTCCGGCGGTGGAGGATCACAGGTCA
CATTGAAGGAATCTGGCCCCGGCCTTGTTCAGCCAGGACAGACCCTTAGCCTCACCTGTGCCTTCAGTGGTTTTTCT
CTTAGCACTAGCGGTATGGGGGTCGGCTGGATTCGGCAGCCTCCCGGCAAAGGTCTTGAGTGGTTGGCTCACATTTG
GTGGGACGACGACAAACGGTATAATCCTGCCTTGAAAAGTCGGCTGACCATTAGTAAGGATACCTCAAAAAATCAAG
TGTACTTGCAAATGAATAGCCTTGACGCCGAGGATACGGCTGTATATTATTGCGCGCGGATGGAACTCTGGTCTTAC
TACTTTGATTATTGGGGGCAGGGGACTCTCGTCACGGTCTCGAGTGGCGGTGGAGGGTCCGGCGGTGGTGGATCAGA
AATCGTCCTTACACAATCTCCTAGCACACTGAGTGTGAGCCCCGGCGAACGCGCGACTTTCTCTTGCAGGGCAAGTC
AATCCATAGGGACTAATATACATTGGTATCAACAAAAGCCAGGTAAACCACCCAGGCTTTTGATTAAGTATGCAAGT
GAGTCTATTTCCGGTATCCCTGACCGCTTCTCTGGATCAGGCAGTGGCACAGAGTTCACACTCACCATATCTAGTGT
GCAATCAGAGGACTTCGCCGTGTATTACTGCCAACAGAATAATAACTGGCCGACTACCTTCGGACCCGGTACAAAGC
TGACCGTTTTACGTACGGTGGCTGCACCATCTGTCTTCATCTTCCCGCCATCTGATGAGCAGTTGAAATCTGGAACT
GCCTCTGTTGTGTGCCTGCTGAATAACTTCTATCCCAGAGAGGCCAAAGTACAGTGGAAGGTGGATAACGCCCTCCA
ATCGGGTAACTCCCAGGAGAGTGTCACAGAGCAGGACAGCAAGGACAGCACCTACAGCCTCAGCAGCACCCTGACGC
TGAGCAAAGCAGACTACGAGAAACACAAAGTCTACGCCTGCGAAGTCACCCATCAGGGCCTGAGCTCGCCCGTCACA
AAGAGCTTCAACAGGGGAGAGTGTGGAGGCGACAAAACTCACACATGCCCACCGTGCCCAGCACCTGAAGCCGCGGG
GGGACCGTCAGTCTTCCTCTTCCCCCCAAAACCCAAGGACACCCTCATGATCTCCCGGACCCCTGAGGTCACATGCG
TGGTGGTGGACGTGAGCCACGAAGACCCTGAGGTCAAGTTCAACTGGTACGTGGACGGCGTGGAGGTGCATAATGCC
AAGACAAAGCCGCGGGAGGAGCAGTACAACAGCACGTACCGTGTGGTCAGCGTCCTCACCGTCCTGCACCAGGACTG
GCTGAATGGCAAGGAGTACAAGTGCGCGGTCTCCAACAAAGCCCTCCCAGCCCCCATCGAGAAAACCATCTCCAAAG
CCAAAGGGCAGCCCCGAGAACCACAGGTGTACACCCTGCCCCCAAGCCGGGATGAGCTGACCAAGAACCAGGTCAGC
CTGTGGTGCCTGGTCAAAGGCTTCTATCCCAGCGACATCGCCGTGGAGTGGGAGAGCAATGGGCAGCCGGAGAACAA
CTACAAGACCACGCCTCCCGTGCTGGACTCCGACGGCTCCTTCTTCCTCTATAGCAAGCTCACCGTGGACAAGAGCA
GGTGGCAGCAGGGGAACGTCTTCTCATGCTCCGTGATGCATGAGGCTCTGCACAACAGATTCACGCAGAAGAGCCTC
TCCCTGTCTCCGGGTGGCGGTGGAGGGTCCGGCGGTGGTGGATCCGACATTCAGATGACACAGTCACCGTCTACGCT
CTCAGCCTCAGTAGGCGATAGGGTGACTATCACCTGCCAAGCCTCCCAATCTATAAGTTCACACCTCAACTGGTATC
AACAGAAACCCGGTAAAGCACCGAAGCTGCTCATCTACAAGGCATCAACTCTTGCCTCAGGTGTGCCTAGTCGCTTC
TCCGGGAGCGGCTCCGGTACTGAGTTTACTTTGACGATATCTTCCCTCCAACCCGACGACTTCGCCACATACTATTG
TCAGCAGGGTTATAGTTGGGGAAATGTTGACAATGTGTTTGGAGGGGGAACGAAAGTGACTGTGTTGGGAGGGGGAG
GAAGTGGCGGCGGCGGAAGCGGAGGTGGTGGCTCCGGCGGGGGTGGAAGCGAAGTGCAATTGCTCGAAAGTGGTGGC
GGACTTGTGCAACCTGGTGGAAGCCTCTCACTCTCTTGCGCGGCGAGTGGTTTTAGCTTCAGTAGCGGCTACGATAT
GTGCTGGGTAAGACAGGCTCCTGGTAAAGGCCTTGAGTGGATTGCGTGTATCGCCGCCGGGTCTGCTGGTATAACAT
ACGATGCAAACTGGGCGAAAGGGCGCTTCACAATCTCCAGGGACAACTCAAAAAATACATTGTACCTCCAGATGAAT
AGCCTGAGAGCCGAAGACACCGCAGTCTACTATTGCGCAAGGTCAGCATTTAGCTTCGATTATGCAATGGATCTTTG
GGGCCAGGGGACGCTCGTCACCGTCTCATCTTGA
>Sequence ID 81: SI-68P18 Chain A Amino Acid Sequence
DVQMTQSPSTLSATVGQRVTINCQASESISSWLAWYQQKPGQPPKLLIYEASKLASGVPSRFSGSGSGTEFTLTISS
LQSDDFATYYCQGYFYFISRTYVNSFGGGTRVEIKGGGGSGGGGSGGGGSGGGGSQQLLESGGRLIKPGATLRLTCK
TSGFTISTNAMSWVRQPPGKGLEWIGVITGRDITYYASWAKGRFTISKTSINTVFLQMRSLRAEDTAVYYCARDGGS
SAITSNNIWGRGTLVTVSSGGGGSGGGGSQVQLQQSGPGLVKPSETLSITCTVSGFSLTNYGVHWIRQAPGKGLEWL
GVIWSGGNTDYNTPFTSRFTITKDNSKNQVYFKLRSVRADDTAIYYCARALTYYDYEFAYWGQGTLVTVSSASTKGP
SVFPLAPSSKSTSGGTAALGCLVKDYFPEPVTVSWNSGALTSGVHTFPAVLQSSGLYSLSSVVTVPSSSLGTQTYIC
NVNHKPSNTKVDKRVEPKSCDKTHTCPPCPAPEAAGGPSVFLFPPKPKDTLMISRTPEVTCVVVDVSHEDPEVKFNW
YVDGVEVHNAKTKPREEQYNSTYRVVSVLTVLHQDWLNGKEYKCAVSNKALPAPIEKTISKAKGQPREPQVYTLPPS
RDELTKNQVSLSCAVKGFYPSDIAVEWESNGQPENNYKTTPPVLDSDGSFFLVSKLTVDKSRWQQGNVFSCSVMHEA
LHNHYTQKSLSLSPGGGGGSGGGGSDVVMTQSPSSVSASVGDRVTITCQASQNIRTYLSWYQQKPGKAPKLLIYAAA
NLASGVPSRFSGSGSGTDFTLTISDLEPGDAATYYCQSTYLGTDYVGGAFGGGTKLTVLGGGGSGGGGSGGGGSGGG
GSEVQLVESGGGLVQPGGSLRLSCTASGFTISSYHMQWVRQAPGKGLEYIGTISSGGNVYYASSARGRFTISRPSSK
NTVDLQMNSLRAEDTAVYYCARDSGYSDPMWGQGTLVTVSS
>Sequence ID 82: SI-68P18 Chain A Nucleotide Sequence
GATGTGCAGATGACCCAGAGCCCGAGCACCCTGAGCGCGACCGTGGGCCAGCGCGTGACCATTAACTGCCAGGCGAG
CGAAAGCATTAGCAGCTGGCTGGCGTGGTATCAGCAGAAACCGGGCCAGCCGCCGAAACTGCTGATTTATGAAGCGA
GCAAACTGGCGAGCGGCGTGCCGAGCCGCTTTAGCGGCAGCGGCAGCGGCACCGAATTTACCCTGACCATTAGCAGC
CTGCAGAGCGATGATTTTGCGACCTATTATTGCCAGGGCTATTTTTATTTTATTAGCCGCACCTATGTGAACAGCTT
TGGCGGCGGCACCCGCGTGGAAATTAAAGGCGGTGGCGGTAGTGGGGGAGGCGGTTCTGGCGGCGGAGGGTCCGGCG
GTGGAGGATCACAGCAGCTGCTGGAAAGCGGCGGCCGCCTGATTAAACCGGGCGCGACCCTGCGCCTGACCTGCAAA
ACCAGCGGCTTTACCATTAGCACCAACGCGATGAGCTGGGTGCGCCAGCCGCCGGGCAAAGGCCTGGAATGGATTGG
CGTGATTACCGGCCGCGATATTACCTATTATGCGAGCTGGGCGAAAGGCCGCTTTACCATTAGCAAAACCAGCATTA
ACACCGTGTTTCTGCAGATGCGCAGCCTGCGCGCGGAAGATACCGCGGTGTATTATTGCGCGCGCGATGGCGGCAGC
AGCGCGATTACCAGCAACAACATTTGGGGCCGCGGCACCCTGGTGACCGTGAGCAGCGGCGGTGGAGGGTCCGGCGG
TGGTGGATCACAAGTACAGTTGCAGCAATCCGGTCCCGGTCTCGTCAAACCGAGTGAGACGCTTAGTATAACGTGTA
CTGTTTCAGGCTTTAGCCTTACGAACTATGGAGTTCACTGGATTCGGCAGGCACCCGGCAAAGGTTTGGAATGGCTG
GGTGTTATTTGGTCAGGTGGAAATACAGACTATAACACCCCCTTTACAAGTCGGTTCACAATTACGAAAGATAATTC
CAAAAATCAAGTTTATTTCAAGTTGAGATCCGTCCGCGCGGACGACACTGCGATCTACTATTGTGCGAGGGCACTGA
CCTACTACGATTACGAATTTGCGTATTGGGGGCAAGGGACTCTTGTAACAGTCTCCAGTGCTAGCACCAAGGGCCCA
TCGGTCTTCCCCCTGGCACCCTCCTCCAAGAGCACCTCTGGGGGCACAGCGGCCCTGGGCTGCCTGGTCAAGGACTA
CTTCCCCGAACCGGTGACGGTGTCGTGGAACTCAGGCGCCCTGACCAGCGGCGTGCACACCTTCCCGGCTGTCCTAC
AGTCCTCAGGACTCTACTCCCTCAGCAGCGTGGTGACCGTGCCCTCCAGCAGCTTGGGCACCCAGACCTACATCTGC
AACGTGAATCACAAGCCCAGCAACACCAAGGTGGACAAGAGAGTTGAGCCCAAATCTTGTGACAAAACTCACACATG
CCCACCGTGCCCAGCACCTGAAGCCGCGGGGGGACCGTCAGTCTTCCTCTTCCCCCCAAAACCCAAGGACACCCTCA
TGATCTCCCGGACCCCTGAGGTCACATGCGTGGTGGTGGACGTGAGCCACGAAGACCCTGAGGTCAAGTTCAACTGG
TACGTGGACGGCGTGGAGGTGCATAATGCCAAGACAAAGCCGCGGGAGGAGCAGTACAACAGCACGTACCGTGTGGT
CAGCGTCCTCACCGTCCTGCACCAGGACTGGCTGAATGGCAAGGAGTACAAGTGCGCGGTCTCCAACAAAGCCCTCC
CAGCCCCCATCGAGAAAACCATCTCCAAAGCCAAAGGGCAGCCCCGAGAACCACAGGTGTATACCCTGCCCCCATCC
CGGGATGAGCTGACCAAGAACCAGGTCAGCCTGTCCTGCGCCGTCAAAGGCTTCTATCCCAGCGACATCGCCGTGGA
GTGGGAGAGCAATGGGCAGCCGGAGAACAACTACAAGACCACGCCTCCCGTGCTGGACTCCGACGGCTCCTTCTTCC
TCGTGAGCAAGCTCACCGTGGACAAGAGCAGGTGGCAGCAGGGGAACGTCTTCTCATGCTCCGTGATGCATGAGGCT
CTGCACAACCACTACACGCAGAAGAGCCTCTCCCTGTCTCCGGGTGGCGGCGGCGGTTCAGGTGGTGGGGGATCCGA
CGTTGTGATGACGCAGTCTCCTAGTTCAGTATCAGCGTCTGTTGGGGATCGAGTCACGATTACATGCCAGGCGAGCC
AAAATATTAGGACGTATCTGTCTTGGTATCAACAAAAGCCTGGTAAGGCTCCAAAACTCCTCATTTACGCCGCTGCC
AACTTGGCTAGTGGAGTACCTTCACGCTTTAGTGGGTCAGGTTCTGGAACAGATTTTACGTTGACGATCTCCGATTT
GGAACCAGGGGACGCTGCCACGTATTATTGCCAGTCCACCTACCTCGGGACTGACTACGTTGGTGGGGCGTTTGGCG
GAGGAACAAAACTCACTGTACTTGGTGGTGGTGGTTCAGGCGGGGGGGGTTCCGGCGGAGGCGGTTCTGGGGGTGGA
GGTTCCGAGGTTCAGTTGGTTGAAAGTGGGGGGGGACTCGTTCAGCCTGGAGGCTCTTTGCGACTTTCTTGTACCGC
TTCTGGGTTCACTATAAGTTCATATCATATGCAATGGGTAAGACAGGCGCCTGGTAAGGGACTTGAATACATAGGAA
CAATAAGCTCTGGTGGTAACGTCTATTACGCCTCATCCGCGCGGGGGAGGTTTACAATTTCCAGGCCTTCTAGCAAA
AACACGGTAGATCTGCAAATGAACTCTCTTCGCGCTGAAGATACAGCAGTCTACTACTGCGCCAGGGATTCAGGGTA
TTCTGACCCCATGTGGGGGCAGGGCACATTGGTTACCGTGTCCTCTTGA
>Sequence ID 83: SI-68P18 Chain B Amino Acid Sequence
ENVLTQSPASLSASPGERVTITCSASSSVSYMHWYQQKPGQAPKLWIYDTSKLASGVPSRFSGSGSGNDHTLTISSM
EPEDFATYYCFQGSVYPFTFGQGTKVTVLGGGGSGGGGSGGGGSGGGGSQVTLKESGPGLVQPGQTLSLTCAFSGFS
LSTSGMGVGWIRQPPGKGLEWLAHIWWDDDKRYNPALKSRLTISKDTSKNQVYLQMNSLDAEDTAVYYCARMELWSY
YFDYWGQGTLVTVSSGGGGSGGGGSEIVLTQSPSTLSVSPGERATFSCRASQSIGTNIHWYQQKPGKPPRLLIKYAS
ESISGIPDRFSGSGSGTEFTLTISSVQSEDFAVYYCQQNNNWPTTFGPGTKLTVLRTVAAPSVFIFPPSDEQLKSGT
ASVVCLLNNFYPREAKVQWKVDNALQSGNSQESVTEQDSKDSTYSLSSTLTLSKADYEKHKVYACEVTHQGLSSPVT
KSFNRGECGGDKTHTCPPCPAPEAAGGPSVFLFPPKPKDTLMISRTPEVTCVVVDVSHEDPEVKFNWYVDGVEVHNA
KTKPREEQYNSTYRVVSVLTVLHQDWLNGKEYKCAVSNKALPAPIEKTISKAKGQPREPQVYTLPPSRDELTKNQVS
LWCLVKGFYPSDIAVEWESNGQPENNYKTTPPVLDSDGSFFLYSKLTVDKSRWQQGNVFSCSVMHEALHNRFTQKSL
SLSPGGGGGSGGGGSDIQMTQSPSTLSASVGDRVTITCQASQSISSHLNWYQQKPGKAPKLLIYKASTLASGVPSRF
SGSGSGTEFTLTISSLQPDDFATYYCQQGYSWGNVDNVFGGGTKVTVLGGGGSGGGGSGGGGSGGGGSEVQLLESGG
GLVQPGGSLSLSCAASGFSFSSGYDMCWVRQAPGKGLEWIACIAAGSAGITYDANWAKGRFTISRDNSKNTLYLQMN
SLRAEDTAVYYCARSAFSFDYAMDLWGQGTLVTVSS
>Sequence ID 84: SI-68P18 Chain B Nucleotide Sequence
GAAAATGTATTGACACAGAGCCCCGCCTCCCTCAGTGCCTCACCTGGGGAAAGGGTAACTATCACTTGCTCTGCATC
AAGCAGCGTCTCATACATGCATTGGTATCAACAAAAGCCTGGACAGGCCCCCAAGCTCTGGATATACGATACGAGCA
AGCTGGCTTCCGGCGTACCTAGCCGCTTCAGTGGTTCCGGCTCAGGCAACGATCACACCCTTACGATTTCCAGTATG
GAACCCGAAGATTTTGCAACTTATTATTGTTTCCAGGGGAGCGTGTACCCATTCACTTTCGGGCAGGGGACAAAAGT
GACCGTCCTAGGCGGTGGCGGTAGTGGGGGAGGCGGTTCTGGCGGCGGAGGGTCCGGCGGTGGAGGATCACAGGTCA
CATTGAAGGAATCTGGCCCCGGCCTTGTTCAGCCAGGACAGACCCTTAGCCTCACCTGTGCCTTCAGTGGTTTTTCT
CTTAGCACTAGCGGTATGGGGGTCGGCTGGATTCGGCAGCCTCCCGGCAAAGGTCTTGAGTGGTTGGCTCACATTTG
GTGGGACGACGACAAACGGTATAATCCTGCCTTGAAAAGTCGGCTGACCATTAGTAAGGATACCTCAAAAAATCAAG
TGTACTTGCAAATGAATAGCCTTGACGCCGAGGATACGGCTGTATATTATTGCGCGCGGATGGAACTCTGGTCTTAC
TACTTTGATTATTGGGGGCAGGGGACTCTCGTCACGGTCTCGAGTGGCGGTGGAGGGTCCGGCGGTGGTGGATCAGA
AATCGTCCTTACACAATCTCCTAGCACACTGAGTGTGAGCCCCGGCGAACGCGCGACTTTCTCTTGCAGGGCAAGTC
AATCCATAGGGACTAATATACATTGGTATCAACAAAAGCCAGGTAAACCACCCAGGCTTTTGATTAAGTATGCAAGT
GAGTCTATTTCCGGTATCCCTGACCGCTTCTCTGGATCAGGCAGTGGCACAGAGTTCACACTCACCATATCTAGTGT
GCAATCAGAGGACTTCGCCGTGTATTACTGCCAACAGAATAATAACTGGCCGACTACCTTCGGACCCGGTACAAAGC
TGACCGTTTTACGTACGGTGGCTGCACCATCTGTCTTCATCTTCCCGCCATCTGATGAGCAGTTGAAATCTGGAACT
GCCTCTGTTGTGTGCCTGCTGAATAACTTCTATCCCAGAGAGGCCAAAGTACAGTGGAAGGTGGATAACGCCCTCCA
ATCGGGTAACTCCCAGGAGAGTGTCACAGAGCAGGACAGCAAGGACAGCACCTACAGCCTCAGCAGCACCCTGACGC
TGAGCAAAGCAGACTACGAGAAACACAAAGTCTACGCCTGCGAAGTCACCCATCAGGGCCTGAGCTCGCCCGTCACA
AAGAGCTTCAACAGGGGAGAGTGTGGAGGCGACAAAACTCACACATGCCCACCGTGCCCAGCACCTGAAGCCGCGGG
GGGACCGTCAGTCTTCCTCTTCCCCCCAAAACCCAAGGACACCCTCATGATCTCCCGGACCCCTGAGGTCACATGCG
TGGTGGTGGACGTGAGCCACGAAGACCCTGAGGTCAAGTTCAACTGGTACGTGGACGGCGTGGAGGTGCATAATGCC
AAGACAAAGCCGCGGGAGGAGCAGTACAACAGCACGTACCGTGTGGTCAGCGTCCTCACCGTCCTGCACCAGGACTG
GCTGAATGGCAAGGAGTACAAGTGCGCGGTCTCCAACAAAGCCCTCCCAGCCCCCATCGAGAAAACCATCTCCAAAG
CCAAAGGGCAGCCCCGAGAACCACAGGTGTACACCCTGCCCCCAAGCCGGGATGAGCTGACCAAGAACCAGGTCAGC
CTGTGGTGCCTGGTCAAAGGCTTCTATCCCAGCGACATCGCCGTGGAGTGGGAGAGCAATGGGCAGCCGGAGAACAA
CTACAAGACCACGCCTCCCGTGCTGGACTCCGACGGCTCCTTCTTCCTCTATAGCAAGCTCACCGTGGACAAGAGCA
GGTGGCAGCAGGGGAACGTCTTCTCATGCTCCGTGATGCATGAGGCTCTGCACAACAGATTCACGCAGAAGAGCCTC
TCCCTGTCTCCGGGTGGCGGTGGAGGGTCCGGCGGTGGTGGATCCGACATTCAGATGACACAGTCACCGTCTACGCT
CTCAGCCTCAGTAGGCGATAGGGTGACTATCACCTGCCAAGCCTCCCAATCTATAAGTTCACACCTCAACTGGTATC
AACAGAAACCCGGTAAAGCACCGAAGCTGCTCATCTACAAGGCATCAACTCTTGCCTCAGGTGTGCCTAGTCGCTTC
TCCGGGAGCGGCTCCGGTACTGAGTTTACTTTGACGATATCTTCCCTCCAACCCGACGACTTCGCCACATACTATTG
TCAGCAGGGTTATAGTTGGGGAAATGTTGACAATGTGTTTGGAGGGGGAACGAAAGTGACTGTGTTGGGAGGGGGAG
GAAGTGGCGGCGGCGGAAGCGGAGGTGGTGGCTCCGGCGGGGGTGGAAGCGAAGTGCAATTGCTCGAAAGTGGTGGC
GGACTTGTGCAACCTGGTGGAAGCCTCTCACTCTCTTGCGCGGCGAGTGGTTTTAGCTTCAGTAGCGGCTACGATAT
GTGCTGGGTAAGACAGGCTCCTGGTAAAGGCCTTGAGTGGATTGCGTGTATCGCCGCCGGGTCTGCTGGTATAACAT
ACGATGCAAACTGGGCGAAAGGGCGCTTCACAATCTCCAGGGACAACTCAAAAAATACATTGTACCTCCAGATGAAT
AGCCTGAGAGCCGAAGACACCGCAGTCTACTATTGCGCAAGGTCAGCATTTAGCTTCGATTATGCAATGGATCTTTG
GGGCCAGGGGACGCTCGTCACCGTCTCATCTTGA
>Sequence ID 85: SI-68P19 Chain A Amino Acid Sequence
DVVMTQSPSSLSASVGDRVTISCQASESISSWLAWYQQKPGQAPKLLIYEASKLASGVPSRFSGSGSGTEFTLTISS
LEPEDFATYYCQGYFYFISRTYVNSFGGGTKVEIKGGGGSGGGGSGGGGSGGGGSQQLVESGGGLVKPGGSLRLSCA
ASGFTISTNAMSWVRQAPGKGLEWVGVITGRDITYYASWAKGRFTISKTSKNTVYLQMNSLRAEDTAVYYCARDGGS
SAITSNNIWGQGTLVTVSSGGGGSGGGGSQVQLQQSGPGLVKPSETLSITCTVSGFSLTNYGVHWIRQAPGKGLEWL
GVIWSGGNTDYNTPFTSRFTITKDNSKNQVYFKLRSVRADDTAIYYCARALTYYDYEFAYWGQGTLVTVSSASTKGP
SVFPLAPSSKSTSGGTAALGCLVKDYFPEPVTVSWNSGALTSGVHTFPAVLQSSGLYSLSSVVTVPSSSLGTQTYIC
NVNHKPSNTKVDKRVEPKSCDKTHTCPPCPAPEAAGGPSVFLFPPKPKDTLMISRTPEVTCVVVDVSHEDPEVKFNW
YVDGVEVHNAKTKPREEQYNSTYRVVSVLTVLHQDWLNGKEYKCAVSNKALPAPIEKTISKAKGQPREPQVYTLPPS
RDELTKNQVSLSCAVKGFYPSDIAVEWESNGQPENNYKTTPPVLDSDGSFFLVSKLTVDKSRWQQGNVFSCSVMHEA
LHNHYTQKSLSLSPGGGGGSGGGGSDVVMTQSPSSVSASVGDRVTITCQASQNIRTYLSWYQQKPGKAPKLLIYAAA
NLASGVPSRFSGSGSGTDFTLTISDLEPGDAATYYCQSTYLGTDYVGGAFGGGTKLTVLGGGGSGGGGSGGGGSGGG
GSEVQLVESGGGLVQPGGSLRLSCTASGFTISSYHMQWVRQAPGKGLEYIGTISSGGNVYYASSARGRFTISRPSSK
NTVDLQMNSLRAEDTAVYYCARDSGYSDPMWGQGTLVTVSS
>Sequence ID 86: SI-68P19 Chain A Nucleotide Sequence
GATGTGGTGATGACCCAGAGCCCGAGCAGCCTGAGCGCGAGCGTGGGCGATCGCGTGACCATTAGCTGCCAGGCGAG
CGAAAGCATTAGCAGCTGGCTGGCGTGGTATCAGCAGAAACCGGGCCAGGCGCCGAAACTGCTGATTTATGAAGCGA
GCAAACTGGCGAGCGGCGTGCCGAGCCGCTTTAGCGGCAGCGGCAGCGGCACCGAATTTACCCTGACCATTAGCAGC
CTGGAACCGGAAGATTTTGCGACCTATTATTGCCAGGGCTATTTTTATTTTATTAGCCGCACCTATGTGAACAGCTT
TGGCGGCGGCACCAAAGTGGAAATTAAAGGCGGTGGCGGTAGTGGGGGAGGCGGTTCTGGCGGCGGAGGGTCCGGCG
GTGGAGGATCACAGCAGCTGGTGGAAAGCGGCGGCGGCCTGGTGAAACCGGGCGGCAGCCTGCGCCTGAGCTGCGCG
GCGAGCGGCTTTACCATTAGCACCAACGCGATGAGCTGGGTGCGCCAGGCGCCGGGCAAAGGCCTGGAATGGGTGGG
CGTGATTACCGGCCGCGATATTACCTATTATGCGAGCTGGGCGAAAGGCCGCTTTACCATTAGCAAAACCAGCAAAA
ACACCGTGTATCTGCAGATGAACAGCCTGCGCGCGGAAGATACCGCGGTGTATTATTGCGCGCGCGATGGCGGCAGC
AGCGCGATTACCAGCAACAACATTTGGGGCCAGGGCACCCTGGTGACCGTGAGCAGCGGCGGTGGAGGGTCCGGCGG
TGGTGGATCACAAGTACAGTTGCAGCAATCCGGTCCCGGTCTCGTCAAACCGAGTGAGACGCTTAGTATAACGTGTA
CTGTTTCAGGCTTTAGCCTTACGAACTATGGAGTTCACTGGATTCGGCAGGCACCCGGCAAAGGTTTGGAATGGCTG
GGTGTTATTTGGTCAGGTGGAAATACAGACTATAACACCCCCTTTACAAGTCGGTTCACAATTACGAAAGATAATTC
CAAAAATCAAGTTTATTTCAAGTTGAGATCCGTCCGCGCGGACGACACTGCGATCTACTATTGTGCGAGGGCACTGA
CCTACTACGATTACGAATTTGCGTATTGGGGGCAAGGGACTCTTGTAACAGTCTCCAGTGCTAGCACCAAGGGCCCA
TCGGTCTTCCCCCTGGCACCCTCCTCCAAGAGCACCTCTGGGGGCACAGCGGCCCTGGGCTGCCTGGTCAAGGACTA
CTTCCCCGAACCGGTGACGGTGTCGTGGAACTCAGGCGCCCTGACCAGCGGCGTGCACACCTTCCCGGCTGTCCTAC
AGTCCTCAGGACTCTACTCCCTCAGCAGCGTGGTGACCGTGCCCTCCAGCAGCTTGGGCACCCAGACCTACATCTGC
AACGTGAATCACAAGCCCAGCAACACCAAGGTGGACAAGAGAGTTGAGCCCAAATCTTGTGACAAAACTCACACATG
CCCACCGTGCCCAGCACCTGAAGCCGCGGGGGGACCGTCAGTCTTCCTCTTCCCCCCAAAACCCAAGGACACCCTCA
TGATCTCCCGGACCCCTGAGGTCACATGCGTGGTGGTGGACGTGAGCCACGAAGACCCTGAGGTCAAGTTCAACTGG
TACGTGGACGGCGTGGAGGTGCATAATGCCAAGACAAAGCCGCGGGAGGAGCAGTACAACAGCACGTACCGTGTGGT
CAGCGTCCTCACCGTCCTGCACCAGGACTGGCTGAATGGCAAGGAGTACAAGTGCGCGGTCTCCAACAAAGCCCTCC
CAGCCCCCATCGAGAAAACCATCTCCAAAGCCAAAGGGCAGCCCCGAGAACCACAGGTGTATACCCTGCCCCCATCC
CGGGATGAGCTGACCAAGAACCAGGTCAGCCTGTCCTGCGCCGTCAAAGGCTTCTATCCCAGCGACATCGCCGTGGA
GTGGGAGAGCAATGGGCAGCCGGAGAACAACTACAAGACCACGCCTCCCGTGCTGGACTCCGACGGCTCCTTCTTCC
TCGTGAGCAAGCTCACCGTGGACAAGAGCAGGTGGCAGCAGGGGAACGTCTTCTCATGCTCCGTGATGCATGAGGCT
CTGCACAACCACTACACGCAGAAGAGCCTCTCCCTGTCTCCGGGTGGCGGCGGCGGTTCAGGTGGTGGGGGATCCGA
CGTTGTGATGACGCAGTCTCCTAGTTCAGTATCAGCGTCTGTTGGGGATCGAGTCACGATTACATGCCAGGCGAGCC
AAAATATTAGGACGTATCTGTCTTGGTATCAACAAAAGCCTGGTAAGGCTCCAAAACTCCTCATTTACGCCGCTGCC
AACTTGGCTAGTGGAGTACCTTCACGCTTTAGTGGGTCAGGTTCTGGAACAGATTTTACGTTGACGATCTCCGATTT
GGAACCAGGGGACGCTGCCACGTATTATTGCCAGTCCACCTACCTCGGGACTGACTACGTTGGTGGGGCGTTTGGCG
GAGGAACAAAACTCACTGTACTTGGTGGTGGTGGTTCAGGCGGGGGGGGTTCCGGCGGAGGCGGTTCTGGGGGTGGA
GGTTCCGAGGTTCAGTTGGTTGAAAGTGGGGGGGGACTCGTTCAGCCTGGAGGCTCTTTGCGACTTTCTTGTACCGC
TTCTGGGTTCACTATAAGTTCATATCATATGCAATGGGTAAGACAGGCGCCTGGTAAGGGACTTGAATACATAGGAA
CAATAAGCTCTGGTGGTAACGTCTATTACGCCTCATCCGCGCGGGGGAGGTTTACAATTTCCAGGCCTTCTAGCAAA
AACACGGTAGATCTGCAAATGAACTCTCTTCGCGCTGAAGATACAGCAGTCTACTACTGCGCCAGGGATTCAGGGTA
TTCTGACCCCATGTGGGGGCAGGGCACATTGGTTACCGTGTCCTCTTGA
>Sequence ID 87: SI-68P19 Chain B Amino Acid Sequence
ENVLTQSPASLSASPGERVTITCSASSSVSYMHWYQQKPGQAPKLWIYDTSKLASGVPSRFSGSGSGNDHTLTISSM
EPEDFATYYCFQGSVYPFTFGQGTKVTVLGGGGSGGGGSGGGGSGGGGSQVTLKESGPGLVQPGQTLSLTCAFSGFS
LSTSGMGVGWIRQPPGKGLEWLAHIWWDDDKRYNPALKSRLTISKDTSKNQVYLQMNSLDAEDTAVYYCARMELWSY
YFDYWGQGTLVTVSSGGGGSGGGGSEIVLTQSPSTLSVSPGERATFSCRASQSIGTNIHWYQQKPGKPPRLLIKYAS
ESISGIPDRFSGSGSGTEFTLTISSVQSEDFAVYYCQQNNNWPTTFGPGTKLTVLRTVAAPSVFIFPPSDEQLKSGT
ASVVCLLNNFYPREAKVQWKVDNALQSGNSQESVTEQDSKDSTYSLSSTLTLSKADYEKHKVYACEVTHQGLSSPVT
KSFNRGECGGDKTHTCPPCPAPEAAGGPSVFLFPPKPKDTLMISRTPEVTCVVVDVSHEDPEVKFNWYVDGVEVHNA
KTKPREEQYNSTYRVVSVLTVLHQDWLNGKEYKCAVSNKALPAPIEKTISKAKGQPREPQVYTLPPSRDELTKNQVS
LWCLVKGFYPSDIAVEWESNGQPENNYKTTPPVLDSDGSFFLYSKLTVDKSRWQQGNVFSCSVMHEALHNRFTQKSL
SLSPGGGGGSGGGGSDIQMTQSPSTLSASVGDRVTITCQASQSISSHLNWYQQKPGKAPKLLIYKASTLASGVPSRF
SGSGSGTEFTLTISSLQPDDFATYYCQQGYSWGNVDNVFGGGTKVTVLGGGGSGGGGSGGGGSGGGGSEVQLLESGG
GLVQPGGSLSLSCAASGFSFSSGYDMCWVRQAPGKGLEWIACIAAGSAGITYDANWAKGRFTISRDNSKNTLYLQMN
SLRAEDTAVYYCARSAFSFDYAMDLWGQGTLVTVSS
>Sequence ID 88: SI-68P19 Chain B Nucleotide Sequence
GAAAATGTATTGACACAGAGCCCCGCCTCCCTCAGTGCCTCACCTGGGGAAAGGGTAACTATCACTTGCTCTGCATC
AAGCAGCGTCTCATACATGCATTGGTATCAACAAAAGCCTGGACAGGCCCCCAAGCTCTGGATATACGATACGAGCA
AGCTGGCTTCCGGCGTACCTAGCCGCTTCAGTGGTTCCGGCTCAGGCAACGATCACACCCTTACGATTTCCAGTATG
GAACCCGAAGATTTTGCAACTTATTATTGTTTCCAGGGGAGCGTGTACCCATTCACTTTCGGGCAGGGGACAAAAGT
GACCGTCCTAGGCGGTGGCGGTAGTGGGGGAGGCGGTTCTGGCGGCGGAGGGTCCGGCGGTGGAGGATCACAGGTCA
CATTGAAGGAATCTGGCCCCGGCCTTGTTCAGCCAGGACAGACCCTTAGCCTCACCTGTGCCTTCAGTGGTTTTTCT
CTTAGCACTAGCGGTATGGGGGTCGGCTGGATTCGGCAGCCTCCCGGCAAAGGTCTTGAGTGGTTGGCTCACATTTG
GTGGGACGACGACAAACGGTATAATCCTGCCTTGAAAAGTCGGCTGACCATTAGTAAGGATACCTCAAAAAATCAAG
TGTACTTGCAAATGAATAGCCTTGACGCCGAGGATACGGCTGTATATTATTGCGCGCGGATGGAACTCTGGTCTTAC
TACTTTGATTATTGGGGGCAGGGGACTCTCGTCACGGTCTCGAGTGGCGGTGGAGGGTCCGGCGGTGGTGGATCAGA
AATCGTCCTTACACAATCTCCTAGCACACTGAGTGTGAGCCCCGGCGAACGCGCGACTTTCTCTTGCAGGGCAAGTC
AATCCATAGGGACTAATATACATTGGTATCAACAAAAGCCAGGTAAACCACCCAGGCTTTTGATTAAGTATGCAAGT
GAGTCTATTTCCGGTATCCCTGACCGCTTCTCTGGATCAGGCAGTGGCACAGAGTTCACACTCACCATATCTAGTGT
GCAATCAGAGGACTTCGCCGTGTATTACTGCCAACAGAATAATAACTGGCCGACTACCTTCGGACCCGGTACAAAGC
TGACCGTTTTACGTACGGTGGCTGCACCATCTGTCTTCATCTTCCCGCCATCTGATGAGCAGTTGAAATCTGGAACT
GCCTCTGTTGTGTGCCTGCTGAATAACTTCTATCCCAGAGAGGCCAAAGTACAGTGGAAGGTGGATAACGCCCTCCA
ATCGGGTAACTCCCAGGAGAGTGTCACAGAGCAGGACAGCAAGGACAGCACCTACAGCCTCAGCAGCACCCTGACGC
TGAGCAAAGCAGACTACGAGAAACACAAAGTCTACGCCTGCGAAGTCACCCATCAGGGCCTGAGCTCGCCCGTCACA
AAGAGCTTCAACAGGGGAGAGTGTGGAGGCGACAAAACTCACACATGCCCACCGTGCCCAGCACCTGAAGCCGCGGG
GGGACCGTCAGTCTTCCTCTTCCCCCCAAAACCCAAGGACACCCTCATGATCTCCCGGACCCCTGAGGTCACATGCG
TGGTGGTGGACGTGAGCCACGAAGACCCTGAGGTCAAGTTCAACTGGTACGTGGACGGCGTGGAGGTGCATAATGCC
AAGACAAAGCCGCGGGAGGAGCAGTACAACAGCACGTACCGTGTGGTCAGCGTCCTCACCGTCCTGCACCAGGACTG
GCTGAATGGCAAGGAGTACAAGTGCGCGGTCTCCAACAAAGCCCTCCCAGCCCCCATCGAGAAAACCATCTCCAAAG
CCAAAGGGCAGCCCCGAGAACCACAGGTGTACACCCTGCCCCCAAGCCGGGATGAGCTGACCAAGAACCAGGTCAGC
CTGTGGTGCCTGGTCAAAGGCTTCTATCCCAGCGACATCGCCGTGGAGTGGGAGAGCAATGGGCAGCCGGAGAACAA
CTACAAGACCACGCCTCCCGTGCTGGACTCCGACGGCTCCTTCTTCCTCTATAGCAAGCTCACCGTGGACAAGAGCA
GGTGGCAGCAGGGGAACGTCTTCTCATGCTCCGTGATGCATGAGGCTCTGCACAACAGATTCACGCAGAAGAGCCTC
TCCCTGTCTCCGGGTGGCGGTGGAGGGTCCGGCGGTGGTGGATCCGACATTCAGATGACACAGTCACCGTCTACGCT
CTCAGCCTCAGTAGGCGATAGGGTGACTATCACCTGCCAAGCCTCCCAATCTATAAGTTCACACCTCAACTGGTATC
AACAGAAACCCGGTAAAGCACCGAAGCTGCTCATCTACAAGGCATCAACTCTTGCCTCAGGTGTGCCTAGTCGCTTC
TCCGGGAGCGGCTCCGGTACTGAGTTTACTTTGACGATATCTTCCCTCCAACCCGACGACTTCGCCACATACTATTG
TCAGCAGGGTTATAGTTGGGGAAATGTTGACAATGTGTTTGGAGGGGGAACGAAAGTGACTGTGTTGGGAGGGGGAG
GAAGTGGCGGCGGCGGAAGCGGAGGTGGTGGCTCCGGCGGGGGTGGAAGCGAAGTGCAATTGCTCGAAAGTGGTGGC
GGACTTGTGCAACCTGGTGGAAGCCTCTCACTCTCTTGCGCGGCGAGTGGTTTTAGCTTCAGTAGCGGCTACGATAT
GTGCTGGGTAAGACAGGCTCCTGGTAAAGGCCTTGAGTGGATTGCGTGTATCGCCGCCGGGTCTGCTGGTATAACAT
ACGATGCAAACTGGGCGAAAGGGCGCTTCACAATCTCCAGGGACAACTCAAAAAATACATTGTACCTCCAGATGAAT
AGCCTGAGAGCCGAAGACACCGCAGTCTACTATTGCGCAAGGTCAGCATTTAGCTTCGATTATGCAATGGATCTTTG
GGGCCAGGGGACGCTCGTCACCGTCTCATCTTGA
>Sequence ID 89: SI-68P16 Chain A Amino Acid Sequence
DPVLTQSPSSLSASVGDRVTISCQSSQSVAKNNNLAWFQQKPGQAPKLLIYSASTLAAGVPSRFSGSGSGTDFTLTI
SSVQPEDFATYYCSARDSGNIQSFGGGTKVEIKGGGGSGGGGSGGGGSGGGGSQQLVESGGGLVKPGGSLRLSCAAS
GIDLSSNAIGWVRQAPGKGLEWVGVIFGSGNTYYASWAKGRFTISRSKNTVYLQMNSLRAEDTAVYYCARGGYSSDI
WGQGTLVTVSSGGGGSGGGGSQVQLQQSGPGLVKPSETLSITCTVSGFSLTNYGVHWIRQAPGKGLEWLGVIWSGGN
TDYNTPFTSRFTITKDNSKNQVYFKLRSVRADDTAIYYCARALTYYDYEFAYWGQGTLVTVSSASTKGPSVFPLAPS
SKSTSGGTAALGCLVKDYFPEPVTVSWNSGALTSGVHTFPAVLQSSGLYSLSSVVTVPSSSLGTQTYICNVNHKPSN
TKVDKRVEPKSCDKTHTCPPCPAPEAAGGPSVFLFPPKPKDTLMISRTPEVTCVVVDVSHEDPEVKFNWYVDGVEVH
NAKTKPREEQYNSTYRVVSVLTVLHQDWLNGKEYKCAVSNKALPAPIEKTISKAKGQPREPQVYTLPPSRDELTKNQ
VSLSCAVKGFYPSDIAVEWESNGQPENNYKTTPPVLDSDGSFFLVSKLTVDKSRWQQGNVFSCSVMHEALHNHYTQK
SLSLSPGGGGGSGGGGSDVVMTQSPSSVSASVGDRVTITCQASQNIRTYLSWYQQKPGKAPKLLIYAAANLASGVPS
RFSGSGSGTDFTLTISDLEPGDAATYYCQSTYLGTDYVGGAFGGGTKLTVLGGGGSGGGGSGGGGSGGGGSEVQLVE
SGGGLVQPGGSLRLSCTASGFTISSYHMQWVRQAPGKGLEYIGTISSGGNVYYASSARGRFTISRPSSKNTVDLQMN
SLRAEDTAVYYCARDSGYSDPMWGQGTLVTVSS
>Sequence ID 90: SI-68P16 Chain A Nucleotide Sequence
GATCCAGTTCTGACACAAAGTCCATCCAGCCTGTCTGCCTCAGTCGGCGACAGAGTGACCATCAGTTGCCAGAGCTC
ACAGTCTGTGGCTAAGAACAACAACTTGGCGTGGTTCCAACAGAAACCTGGACAGGCTCCGAAATTGCTGATCTATT
CTGCTTCCACGCTTGCTGCTGGTGTTCCTTCCCGCTTTTCAGGTAGTGGTAGCGGGACAGACTTCACTTTGACTATA
AGCAGCGTGCAGCCTGAAGATTTTGCGACCTACTATTGTTCTGCTAGAGACAGTGGAAATATTCAGTCCTTTGGGGG
GGGAACGAAGGTCGAAATAAAGGGCGGCGGAGGGTCTGGTGGGGGTGGCAGTGGTGGTGGAGGAAGTGGTGGCGGTG
GTTCCCAACAGTTGGTTGAGTCTGGTGGCGGTCTCGTTAAGCCTGGAGGGTCCCTTCGGCTTAGTTGTGCGGCCTCT
GGGATCGACCTGTCTAGCAACGCTATAGGATGGGTACGGCAAGCTCCGGGCAAAGGCCTTGAGTGGGTCGGCGTTAT
TTTTGGGAGCGGTAATACGTACTACGCCAGCTGGGCAAAAGGTAGGTTCACTATCAGTCGATCAAAGAACACGGTAT
ATCTTCAGATGAACAGTCTCCGGGCGGAGGACACCGCGGTTTATTATTGCGCAAGGGGGGGATACTCCTCAGACATA
TGGGGCCAAGGTACTTTGGTGACGGTCTCGAGCGGCGGTGGAGGGTCCGGCGGTGGTGGATCACAAGTACAGTTGCA
GCAATCCGGTCCCGGTCTCGTCAAACCGAGTGAGACGCTTAGTATAACGTGTACTGTTTCAGGCTTTAGCCTTACGA
ACTATGGAGTTCACTGGATTCGGCAGGCACCCGGCAAAGGTTTGGAATGGCTGGGTGTTATTTGGTCAGGTGGAAAT
ACAGACTATAACACCCCCTTTACAAGTCGGTTCACAATTACGAAAGATAATTCCAAAAATCAAGTTTATTTCAAGTT
GAGATCCGTCCGCGCGGACGACACTGCGATCTACTATTGTGCGAGGGCACTGACCTACTACGATTACGAATTTGCGT
ATTGGGGGCAAGGGACTCTTGTAACAGTCTCCAGTGCTAGCACCAAGGGCCCATCGGTCTTCCCCCTGGCACCCTCC
TCCAAGAGCACCTCTGGGGGCACAGCGGCCCTGGGCTGCCTGGTCAAGGACTACTTCCCCGAACCGGTGACGGTGTC
GTGGAACTCAGGCGCCCTGACCAGCGGCGTGCACACCTTCCCGGCTGTCCTACAGTCCTCAGGACTCTACTCCCTCA
GCAGCGTGGTGACCGTGCCCTCCAGCAGCTTGGGCACCCAGACCTACATCTGCAACGTGAATCACAAGCCCAGCAAC
ACCAAGGTGGACAAGAGAGTTGAGCCCAAATCTTGTGACAAAACTCACACATGCCCACCGTGCCCAGCACCTGAAGC
CGCGGGGGGACCGTCAGTCTTCCTCTTCCCCCCAAAACCCAAGGACACCCTCATGATCTCCCGGACCCCTGAGGTCA
CATGCGTGGTGGTGGACGTGAGCCACGAAGACCCTGAGGTCAAGTTCAACTGGTACGTGGACGGCGTGGAGGTGCAT
AATGCCAAGACAAAGCCGCGGGAGGAGCAGTACAACAGCACGTACCGTGTGGTCAGCGTCCTCACCGTCCTGCACCA
GGACTGGCTGAATGGCAAGGAGTACAAGTGCGCGGTCTCCAACAAAGCCCTCCCAGCCCCCATCGAGAAAACCATCT
CCAAAGCCAAAGGGCAGCCCCGAGAACCACAGGTGTATACCCTGCCCCCATCCCGGGATGAGCTGACCAAGAACCAG
GTCAGCCTGTCCTGCGCCGTCAAAGGCTTCTATCCCAGCGACATCGCCGTGGAGTGGGAGAGCAATGGGCAGCCGGA
GAACAACTACAAGACCACGCCTCCCGTGCTGGACTCCGACGGCTCCTTCTTCCTCGTGAGCAAGCTCACCGTGGACA
AGAGCAGGTGGCAGCAGGGGAACGTCTTCTCATGCTCCGTGATGCATGAGGCTCTGCACAACCACTACACGCAGAAG
AGCCTCTCCCTGTCTCCGGGTGGCGGCGGCGGTTCAGGTGGTGGGGGATCCGACGTTGTGATGACGCAGTCTCCTAG
TTCAGTATCAGCGTCTGTTGGGGATCGAGTCACGATTACATGCCAGGCGAGCCAAAATATTAGGACGTATCTGTCTT
GGTATCAACAAAAGCCTGGTAAGGCTCCAAAACTCCTCATTTACGCCGCTGCCAACTTGGCTAGTGGAGTACCTTCA
CGCTTTAGTGGGTCAGGTTCTGGAACAGATTTTACGTTGACGATCTCCGATTTGGAACCAGGGGACGCTGCCACGTA
TTATTGCCAGTCCACCTACCTCGGGACTGACTACGTTGGTGGGGCGTTTGGCGGAGGAACAAAACTCACTGTACTTG
GTGGTGGTGGTTCAGGCGGGGGGGGTTCCGGCGGAGGCGGTTCTGGGGGTGGAGGTTCCGAGGTTCAGTTGGTTGAA
AGTGGGGGGGGACTCGTTCAGCCTGGAGGCTCTTTGCGACTTTCTTGTACCGCTTCTGGGTTCACTATAAGTTCATA
TCATATGCAATGGGTAAGACAGGCGCCTGGTAAGGGACTTGAATACATAGGAACAATAAGCTCTGGTGGTAACGTCT
ATTACGCCTCATCCGCGCGGGGGAGGTTTACAATTTCCAGGCCTTCTAGCAAAAACACGGTAGATCTGCAAATGAAC
TCTCTTCGCGCTGAAGATACAGCAGTCTACTACTGCGCCAGGGATTCAGGGTATTCTGACCCCATGTGGGGGCAGGG
CACATTGGTTACCGTGTCCTCTTGA
>Sequence ID 91: SI-68P16 Chain B Amino Acid Sequence
ENVLTQSPASLSASPGERVTITCSASSSVSYMHWYQQKPGQAPKLWIYDTSKLASGVPSRFSGSGSGNDHTLTISSM
EPEDFATYYCFQGSVYPFTFGQGTKVTVLGGGGSGGGGSGGGGSGGGGSQVTLKESGPGLVQPGQTLSLTCAFSGFS
LSTSGMGVGWIRQPPGKGLEWLAHIWWDDDKRYNPALKSRLTISKDTSKNQVYLQMNSLDAEDTAVYYCARMELWSY
YFDYWGQGTLVTVSSGGGGSGGGGSEIVLTQSPSTLSVSPGERATFSCRASQSIGTNIHWYQQKPGKPPRLLIKYAS
ESISGIPDRFSGSGSGTEFTLTISSVQSEDFAVYYCQQNNNWPTTFGPGTKLTVLRTVAAPSVFIFPPSDEQLKSGT
ASVVCLLNNFYPREAKVQWKVDNALQSGNSQESVTEQDSKDSTYSLSSTLTLSKADYEKHKVYACEVTHQGLSSPVT
KSFNRGECGGDKTHTCPPCPAPEAAGGPSVFLFPPKPKDTLMISRTPEVTCVVVDVSHEDPEVKFNWYVDGVEVHNA
KTKPREEQYNSTYRVVSVLTVLHQDWLNGKEYKCAVSNKALPAPIEKTISKAKGQPREPQVYTLPPSRDELTKNQVS
LWCLVKGFYPSDIAVEWESNGQPENNYKTTPPVLDSDGSFFLYSKLTVDKSRWQQGNVFSCSVMHEALHNRFTQKSL
SLSPGGGGGSGGGGSDIQMTQSPSTLSASVGDRVTITCQASQSISSHLNWYQQKPGKAPKLLIYKASTLASGVPSRF
SGSGSGTEFTLTISSLQPDDFATYYCQQGYSWGNVDNVFGGGTKVTVLGGGGSGGGGSGGGGSGGGGSEVQLLESGG
GLVQPGGSLSLSCAASGFSFSSGYDMCWVRQAPGKGLEWIACIAAGSAGITYDANWAKGRFTISRDNSKNTLYLQMN
SLRAEDTAVYYCARSAFSFDYAMDLWGQGTLVTVSS
>Sequence ID 92: SI-68P16 Chain B Nucleotide Sequence
GAAAATGTATTGACACAGAGCCCCGCCTCCCTCAGTGCCTCACCTGGGGAAAGGGTAACTATCACTTGCTCTGCATC
AAGCAGCGTCTCATACATGCATTGGTATCAACAAAAGCCTGGACAGGCCCCCAAGCTCTGGATATACGATACGAGCA
AGCTGGCTTCCGGCGTACCTAGCCGCTTCAGTGGTTCCGGCTCAGGCAACGATCACACCCTTACGATTTCCAGTATG
GAACCCGAAGATTTTGCAACTTATTATTGTTTCCAGGGGAGCGTGTACCCATTCACTTTCGGGCAGGGGACAAAAGT
GACCGTCCTAGGCGGTGGCGGTAGTGGGGGAGGCGGTTCTGGCGGCGGAGGGTCCGGCGGTGGAGGATCACAGGTCA
CATTGAAGGAATCTGGCCCCGGCCTTGTTCAGCCAGGACAGACCCTTAGCCTCACCTGTGCCTTCAGTGGTTTTTCT
CTTAGCACTAGCGGTATGGGGGTCGGCTGGATTCGGCAGCCTCCCGGCAAAGGTCTTGAGTGGTTGGCTCACATTTG
GTGGGACGACGACAAACGGTATAATCCTGCCTTGAAAAGTCGGCTGACCATTAGTAAGGATACCTCAAAAAATCAAG
TGTACTTGCAAATGAATAGCCTTGACGCCGAGGATACGGCTGTATATTATTGCGCGCGGATGGAACTCTGGTCTTAC
TACTTTGATTATTGGGGGCAGGGGACTCTCGTCACGGTCTCGAGTGGCGGTGGAGGGTCCGGCGGTGGTGGATCAGA
AATCGTCCTTACACAATCTCCTAGCACACTGAGTGTGAGCCCCGGCGAACGCGCGACTTTCTCTTGCAGGGCAAGTC
AATCCATAGGGACTAATATACATTGGTATCAACAAAAGCCAGGTAAACCACCCAGGCTTTTGATTAAGTATGCAAGT
GAGTCTATTTCCGGTATCCCTGACCGCTTCTCTGGATCAGGCAGTGGCACAGAGTTCACACTCACCATATCTAGTGT
GCAATCAGAGGACTTCGCCGTGTATTACTGCCAACAGAATAATAACTGGCCGACTACCTTCGGACCCGGTACAAAGC
TGACCGTTTTACGTACGGTGGCTGCACCATCTGTCTTCATCTTCCCGCCATCTGATGAGCAGTTGAAATCTGGAACT
GCCTCTGTTGTGTGCCTGCTGAATAACTTCTATCCCAGAGAGGCCAAAGTACAGTGGAAGGTGGATAACGCCCTCCA
ATCGGGTAACTCCCAGGAGAGTGTCACAGAGCAGGACAGCAAGGACAGCACCTACAGCCTCAGCAGCACCCTGACGC
TGAGCAAAGCAGACTACGAGAAACACAAAGTCTACGCCTGCGAAGTCACCCATCAGGGCCTGAGCTCGCCCGTCACA
AAGAGCTTCAACAGGGGAGAGTGTGGAGGCGACAAAACTCACACATGCCCACCGTGCCCAGCACCTGAAGCCGCGGG
GGGACCGTCAGTCTTCCTCTTCCCCCCAAAACCCAAGGACACCCTCATGATCTCCCGGACCCCTGAGGTCACATGCG
TGGTGGTGGACGTGAGCCACGAAGACCCTGAGGTCAAGTTCAACTGGTACGTGGACGGCGTGGAGGTGCATAATGCC
AAGACAAAGCCGCGGGAGGAGCAGTACAACAGCACGTACCGTGTGGTCAGCGTCCTCACCGTCCTGCACCAGGACTG
GCTGAATGGCAAGGAGTACAAGTGCGCGGTCTCCAACAAAGCCCTCCCAGCCCCCATCGAGAAAACCATCTCCAAAG
CCAAAGGGCAGCCCCGAGAACCACAGGTGTACACCCTGCCCCCAAGCCGGGATGAGCTGACCAAGAACCAGGTCAGC
CTGTGGTGCCTGGTCAAAGGCTTCTATCCCAGCGACATCGCCGTGGAGTGGGAGAGCAATGGGCAGCCGGAGAACAA
CTACAAGACCACGCCTCCCGTGCTGGACTCCGACGGCTCCTTCTTCCTCTATAGCAAGCTCACCGTGGACAAGAGCA
GGTGGCAGCAGGGGAACGTCTTCTCATGCTCCGTGATGCATGAGGCTCTGCACAACAGATTCACGCAGAAGAGCCTC
TCCCTGTCTCCGGGTGGCGGTGGAGGGTCCGGCGGTGGTGGATCCGACATTCAGATGACACAGTCACCGTCTACGCT
CTCAGCCTCAGTAGGCGATAGGGTGACTATCACCTGCCAAGCCTCCCAATCTATAAGTTCACACCTCAACTGGTATC
AACAGAAACCCGGTAAAGCACCGAAGCTGCTCATCTACAAGGCATCAACTCTTGCCTCAGGTGTGCCTAGTCGCTTC
TCCGGGAGCGGCTCCGGTACTGAGTTTACTTTGACGATATCTTCCCTCCAACCCGACGACTTCGCCACATACTATTG
TCAGCAGGGTTATAGTTGGGGAAATGTTGACAATGTGTTTGGAGGGGGAACGAAAGTGACTGTGTTGGGAGGGGGAG
GAAGTGGCGGCGGCGGAAGCGGAGGTGGTGGCTCCGGCGGGGGTGGAAGCGAAGTGCAATTGCTCGAAAGTGGTGGC
GGACTTGTGCAACCTGGTGGAAGCCTCTCACTCTCTTGCGCGGCGAGTGGTTTTAGCTTCAGTAGCGGCTACGATAT
GTGCTGGGTAAGACAGGCTCCTGGTAAAGGCCTTGAGTGGATTGCGTGTATCGCCGCCGGGTCTGCTGGTATAACAT
ACGATGCAAACTGGGCGAAAGGGCGCTTCACAATCTCCAGGGACAACTCAAAAAATACATTGTACCTCCAGATGAAT
AGCCTGAGAGCCGAAGACACCGCAGTCTACTATTGCGCAAGGTCAGCATTTAGCTTCGATTATGCAATGGATCTTTG
GGGCCAGGGGACGCTCGTCACCGTCTCATCTTGA
>Sequence ID 93: SI-75P5 Chain A Amino Acid Sequence
EVQLQESGGGLVQAGDSLSLSCLVSGRSFNSYTMGWFRQAPGKEREFVAAILWSGPTTYYADSVKGRFTISRDNAKN
TVYLQMNSLKPEDTAVYYCAAALGVLVLAPGNVYSYWGQGTQVTVSSGGGGSGGGGSEVQLVESGGGLVQPGGSLRL
SCAASGFTISTNAMSWVRQAPGKGLEWIGVITGRDITYYASWAKGRFTISRDNSKNTLYLQMNSLRAEDTAVYYCAR
DGGSSAITSNNIWGQGTLVTVSSASTKGPSVFPLAPSSKSTSGGTAALGCLVKDYFPEPVTVSWNSGALTSGVHTFP
AVLQSSGLYSLSSVVTVPSSSLGTQTYICNVNHKPSNTKVDKRVEPKSCDKTHTCPPCPAPEAAGGPSVFLFPPKPK
DTLMISRTPEVTCVVVDVSHEDPEVKFNWYVDGVEVHNAKTKPREEQYNSTYRVVSVLTVLHQDWLNGKEYKCAVSN
KALPAPIEKTISKAKGQPREPQVYTLPPSRDELTKNQVSLSCAVKGFYPSDIAVEWESNGQPENNYKTTPPVLDSDG
SFFLVSKLTVDKSRWQQGNVFSCSVMHEALHNHYTQKSLSLSPGGGGGSGGGGSDVVMTQSPSSVSASVGDRVTITC
QASQNIRTYLSWYQQKPGKAPKLLIYAAANLASGVPSRFSGSGSGTDFTLTISDLEPGDAATYYCQSTYLGTDYVGG
AFGGGTKLTVLGGGGSGGGGSGGGGSGGGGSEVQLVESGGGLVQPGGSLRLSCTASGFTISSYHMQWVRQAPGKGLE
YI GT1SSGGNVYYASSARGRFTISRPSSKNTVDLQMNSLRAEDTAVYYCARDSGYSDPMWGQGTLVTVSS
>Sequence ID 94: SI-75P5 Chain A Nucleotide Sequence
GAGGTGCAGCTGCAGGAGTCTGGCGGCGGCCTGGTGCAGGCTGGGGACAGCCTGAGCCTGTCCTGCCTGGTGTCTGG
CCGCTCCTTCAACTCCTACACCATGGGCTGGTTCCGCCAGGCCCCTGGGAAGGAGCGGGAGTTTGTGGCTGCCATCC
TGTGGAGTGGCCCCACCACCTACTATGCTGACTCTGTGAAGGGCCGCTTCACCATCTCCAGAGACAATGCCAAGAAC
ACTGTGTACCTGCAGATGAACAGCCTGAAGCCAGAGGACACAGCTGTGTACTACTGTGCTGCTGCCCTGGGAGTGCT
GGTGCTGGCCCCTGGCAATGTGTACAGCTACTGGGGCCAGGGCACCCAGGTGACTGTCTCGAGCGGCGGTGGAGGGT
CCGGCGGTGGTGGATCAGAGGTGCAGCTGGTGGAGTCTGGGGGAGGCTTGGTCCAGCCTGGGGGGTCCCTGAGACTC
TCCTGTGCAGCCTCTGGATTCACCATCAGTACCAATGCAATGAGCTGGGTCCGCCAGGCTCCAGGGAAGGGGCTGGA
GTGGATCGGAGTCATTACTGGTCGTGATATCACATACTACGCGAGCTGGGCGAAAGGCAGATTCACCATCTCCAGAG
ACAATTCCAAGAACACGCTGTATCTTCAAATGAACAGCCTGAGAGCCGAGGACACGGCTGTGTATTACTGTGCGAGA
GACGGTGGTTCTTCTGCTATTACTAGTAACAACATTTGGGGCCAGGGAACCCTGGTCACCGTGTCCTCAGCTAGCAC
CAAGGGCCCATCGGTCTTCCCCCTGGCACCCTCCTCCAAGAGCACCTCTGGGGGCACAGCGGCCCTGGGCTGCCTGG
TCAAGGACTACTTCCCCGAACCGGTGACGGTGTCGTGGAACTCAGGCGCCCTGACCAGCGGCGTGCACACCTTCCCG
GCTGTCCTACAGTCCTCAGGACTCTACTCCCTCAGCAGCGTGGTGACCGTGCCCTCCAGCAGCTTGGGCACCCAGAC
CTACATCTGCAACGTGAATCACAAGCCCAGCAACACCAAGGTGGACAAGAGAGTTGAGCCCAAATCTTGTGACAAAA
CTCACACATGCCCACCGTGCCCAGCACCTGAAGCCGCGGGGGGACCGTCAGTCTTCCTCTTCCCCCCAAAACCCAAG
GACACCCTCATGATCTCCCGGACCCCTGAGGTCACATGCGTGGTGGTGGACGTGAGCCACGAAGACCCTGAGGTCAA
GTTCAACTGGTACGTGGACGGCGTGGAGGTGCATAATGCCAAGACAAAGCCGCGGGAGGAGCAGTACAACAGCACGT
ACCGTGTGGTCAGCGTCCTCACCGTCCTGCACCAGGACTGGCTGAATGGCAAGGAGTACAAGTGCGCGGTCTCCAAC
AAAGCCCTCCCAGCCCCCATCGAGAAAACCATCTCCAAAGCCAAAGGGCAGCCCCGAGAACCACAGGTGTATACCCT
GCCCCCATCCCGGGATGAGCTGACCAAGAACCAGGTCAGCCTGTCCTGCGCCGTCAAAGGCTTCTATCCCAGCGACA
TCGCCGTGGAGTGGGAGAGCAATGGGCAGCCGGAGAACAACTACAAGACCACGCCTCCCGTGCTGGACTCCGACGGC
TCCTTCTTCCTCGTGAGCAAGCTCACCGTGGACAAGAGCAGGTGGCAGCAGGGGAACGTCTTCTCATGCTCCGTGAT
GCATGAGGCTCTGCACAACCACTACACGCAGAAGAGCCTCTCCCTGTCTCCGGGTGGCGGCGGCGGTTCAGGTGGTG
GGGGATCCGACGTTGTGATGACGCAGTCTCCTAGTTCAGTATCAGCGTCTGTTGGGGATCGAGTCACGATTACATGC
CAGGCGAGCCAAAATATTAGGACGTATCTGTCTTGGTATCAACAAAAGCCTGGTAAGGCTCCAAAACTCCTCATTTA
CGCCGCTGCCAACTTGGCTAGTGGAGTACCTTCACGCTTTAGTGGGTCAGGTTCTGGAACAGATTTTACGTTGACGA
TCTCCGATTTGGAACCAGGGGACGCTGCCACGTATTATTGCCAGTCCACCTACCTCGGGACTGACTACGTTGGTGGG
GCGTTTGGCGGAGGAACAAAACTCACTGTACTTGGTGGTGGTGGTTCAGGCGGGGGGGGTTCCGGCGGAGGCGGTTC
TGGGGGTGGAGGTTCCGAGGTTCAGTTGGTTGAAAGTGGGGGGGGACTCGTTCAGCCTGGAGGCTCTTTGCGACTTT
CTTGTACCGCTTCTGGGTTCACTATAAGTTCATATCATATGCAATGGGTAAGACAGGCGCCTGGTAAGGGACTTGAA
TACATAGGAACAATAAGCTCTGGTGGTAACGTCTATTACGCCTCATCCGCGCGGGGGAGGTTTACAATTTCCAGGCC
TTCTAGCAAAAACACGGTAGATCTGCAAATGAACTCTCTTCGCGCTGAAGATACAGCAGTCTACTACTGCGCCAGGG
ATTCAGGGTATTCTGACCCCATGTGGGGGCAGGGCACATTGGTTACCGTGTCCTCTTGA
>Sequence ID 95: SI-75P5 Chain B Amino Acid Sequence
QVQLVQSGGGLVQAGGSLSLSCAFSGRTFSMYTMGWFRQAPGKEREFVAANRGRGLSPDIADSVNGRFTISRDNAKN
TLYLQMDSLKPEDTAVYYCAADLQYGSSWPQRSSAEYDYWGQGTTVTVSSGGGGSGGGGSDVVMTQSPSTLSASVGD
RVTINCQASESISSWLAWYQQKPGKAPKLLIYEASKLASGVPSRFSGSGSGTEFTLTISSLQPDDFATYYCQGYFYF
ISRTYVNSFGGGTKVEIKRTVAAPSVFIFPPSDEQLKSGTASVVCLLNNFYPREAKVQWKVDNALQSGNSQESVTEQ
DSKDSTYSLSSTLTLSKADYEKHKVYACEVTHQGLSSPVTKSFNRGECGGDKTHTCPPCPAPEAAGGPSVFLFPPKP
KDTLMISRTPEVTCVVVDVSHEDPEVKFNWYVDGVEVHNAKTKPREEQYNSTYRVVSVLTVLHQDWLNGKEYKCAVS
NKALPAPIEKTISKAKGQPREPQVYTLPPSRDELTKNQVSLWCLVKGFYPSDIAVEWESNGQPENNYKTTPPVLDSD
GSFFLYSKLTVDKSRWQQGNVFSCSVMHEALHNRFTQKSLSLSPGGGGGSGGGGSDIQMTQSPSTLSASVGDRVTIT
CQASQSISSHLNWYQQKPGKAPKLLIYKASTLASGVPSRFSGSGSGTEFTLTISSLQPDDFATYYCQQGYSWGNVDN
VFGGGTKVTVLGGGGSGGGGSGGGGSGGGGSEVQLLESGGGLVQPGGSLSLSCAASGFSFSSGYDMCWVRQAPGKGL
EWIACIAAGSAGITYDANWAKGRFTISRDNSKNTLYLQMNSLRAEDTAVYYCARSAFSFDYAMDLWGQGTLVTVSS
>Sequence ID 96: SI-75P5 Chain B Nucleotide Sequence
CAGGTGCAGCTGGTGCAGTCTGGCGGAGGCCTGGTGCAGGCTGGGGGCAGCCTGAGCCTGAGCTGTGCCTTCTCTGG
CCGCACCTTCTCCATGTACACCATGGGCTGGTTCCGCCAGGCCCCAGGGAAGGAGAGAGAGTTTGTGGCTGCCAACA
GAGGCAGAGGCCTGAGCCCAGACATTGCTGACTCTGTGAATGGCCGCTTCACCATCTCCAGAGACAATGCCAAGAAC
ACCCTGTACCTGCAGATGGACAGCCTGAAGCCAGAGGACACAGCTGTGTACTACTGTGCTGCTGACCTGCAGTATGG
CAGCAGCTGGCCTCAGAGGAGCTCTGCTGAGTATGACTACTGGGGCCAGGGCACCACTGTGACTGTCTCGAGCGGCG
GTGGAGGGTCCGGCGGTGGTGGATCAGACGTCGTGATGACCCAGTCTCCTTCCACCCTGTCTGCATCTGTAGGAGAC
AGAGTCACCATCAATTGCCAAGCCAGTGAGAGCATTAGCAGTTGGTTAGCCTGGTATCAGCAGAAACCAGGGAAAGC
CCCTAAGCTCCTGATCTATGAAGCATCCAAACTGGCATCTGGGGTCCCATCAAGGTTCAGCGGCAGTGGATCTGGGA
CAGAATTCACTCTCACCATCAGCAGCCTGCAGCCTGATGATTTTGCAACTTATTACTGCCAAGGCTATTTTTATTTT
ATTAGTCGTACTTATGTAAATTCTTTCGGCGGAGGGACCAAGGTGGAGATCAAACGTACGGTGGCTGCACCATCTGT
CTTCATCTTCCCGCCATCTGATGAGCAGTTGAAATCTGGAACTGCCTCTGTTGTGTGCCTGCTGAATAACTTCTATC
CCAGAGAGGCCAAAGTACAGTGGAAGGTGGATAACGCCCTCCAATCGGGTAACTCCCAGGAGAGTGTCACAGAGCAG
GACAGCAAGGACAGCACCTACAGCCTCAGCAGCACCCTGACGCTGAGCAAAGCAGACTACGAGAAACACAAAGTCTA
CGCCTGCGAAGTCACCCATCAGGGCCTGAGCTCGCCCGTCACAAAGAGCTTCAACAGGGGAGAGTGTGGAGGCGACA
AAACTCACACATGCCCACCGTGCCCAGCACCTGAAGCCGCGGGGGGACCGTCAGTCTTCCTCTTCCCCCCAAAACCC
AAGGACACCCTCATGATCTCCCGGACCCCTGAGGTCACATGCGTGGTGGTGGACGTGAGCCACGAAGACCCTGAGGT
CAAGTTCAACTGGTACGTGGACGGCGTGGAGGTGCATAATGCCAAGACAAAGCCGCGGGAGGAGCAGTACAACAGCA
CGTACCGTGTGGTCAGCGTCCTCACCGTCCTGCACCAGGACTGGCTGAATGGCAAGGAGTACAAGTGCGCGGTCTCC
AACAAAGCCCTCCCAGCCCCCATCGAGAAAACCATCTCCAAAGCCAAAGGGCAGCCCCGAGAACCACAGGTGTACAC
CCTGCCCCCAAGCCGGGATGAGCTGACCAAGAACCAGGTCAGCCTGTGGTGCCTGGTCAAAGGCTTCTATCCCAGCG
ACATCGCCGTGGAGTGGGAGAGCAATGGGCAGCCGGAGAACAACTACAAGACCACGCCTCCCGTGCTGGACTCCGAC
GGCTCCTTCTTCCTCTATAGCAAGCTCACCGTGGACAAGAGCAGGTGGCAGCAGGGGAACGTCTTCTCATGCTCCGT
GATGCATGAGGCTCTGCACAACAGATTCACGCAGAAGAGCCTCTCCCTGTCTCCGGGTGGCGGTGGAGGGTCCGGCG
GTGGTGGATCCGACATTCAGATGACACAGTCACCGTCTACGCTCTCAGCCTCAGTAGGCGATAGGGTGACTATCACC
TGCCAAGCCTCCCAATCTATAAGTTCACACCTCAACTGGTATCAACAGAAACCCGGTAAAGCACCGAAGCTGCTCAT
CTACAAGGCATCAACTCTTGCCTCAGGTGTGCCTAGTCGCTTCTCCGGGAGCGGCTCCGGTACTGAGTTTACTTTGA
CGATATCTTCCCTCCAACCCGACGACTTCGCCACATACTATTGTCAGCAGGGTTATAGTTGGGGAAATGTTGACAAT
GTGTTTGGAGGGGGAACGAAAGTGACTGTGTTGGGAGGGGGAGGAAGTGGCGGCGGCGGAAGCGGAGGTGGTGGCTC
CGGCGGGGGTGGAAGCGAAGTGCAATTGCTCGAAAGTGGTGGCGGACTTGTGCAACCTGGTGGAAGCCTCTCACTCT
CTTGCGCGGCGAGTGGTTTTAGCTTCAGTAGCGGCTACGATATGTGCTGGGTAAGACAGGCTCCTGGTAAAGGCCTT
GAGTGGATTGCGTGTATCGCCGCCGGGTCTGCTGGTATAACATACGATGCAAACTGGGCGAAAGGGCGCTTCACAAT
CTCCAGGGACAACTCAAAAAATACATTGTACCTCCAGATGAATAGCCTGAGAGCCGAAGACACCGCAGTCTACTATT
GCGCAAGGTCAGCATTTAGCTTCGATTATGCAATGGATCTTTGGGGCCAGGGGACGCTCGTCACCGTCTCATCTTGA
>Sequence ID 97: SI-75P8 Chain A Amino Acid Sequence
EVQLQESGGGLVQAGDSLSLSCLVSGRSFNSYTMGWFRQAPGKEREFVAAILWSGPTTYYADSVKGRFTISRDNAKN
TVYLQMNSLKPEDTAVYYCAAALGVLVLAPGNVYSYWGQGTQVTVSSGGGGSGGGGSQVQLQESGGRLVQPGEPLSL
TCKTSGIDLSSNAIGWVRQAPGKGLEWIGVIFGSGNTYYASWAKGRFTISRSTSTVYLKMNSLRSEDTAIYYCARGG
YSSDIWGQGTLVTVSSASTKGPSVFPLAPSSKSTSGGTAALGCLVKDYFPEPVTVSWNSGALTSGVHTFPAVLQSSG
LYSLSSVVTVPSSSLGTQTYICNVNHKPSNTKVDKRVEPKSCDKTHTCPPCPAPEAAGGPSVFLFPPKPKDTLMISR
TPEVTCVVVDVSHEDPEVKFNWYVDGVEVHNAKTKPREEQYNSTYRVVSVLTVLHQDWLNGKEYKCAVSNKALPAPI
EKTISKAKGQPREPQVYTLPPSRDELTKNQVSLSCAVKGFYPSDIAVEWESNGQPENNYKTTPPVLDSDGSFFLVSK
LTVDKSRWQQGNVFSCSVMHEALHNHYTQKSLSLSPGGGGGSGGGGSQVQLQQSGPGLVKPSETLSITCTVSGFSLT
NYGVHWIRQAPGKGLEWLGVIWSGGNTDYNTPFTSRFTITKDNSKNQVYFKLRSVRADDTAIYYCARALTYYDYEFA
YWGQGTLVTVSSGGGGSGGGGSGGGGSGGGGSEIVLTQSPSTLSVSPGERATFSCRASQSIGTNIHWYQQKPGKPPR
LLIKYASESISGIPDRFSGSGSGTEFTLTISSVQSEDFAVYYCQQNNNWPTTFGPGTKLTVL
>Sequence ID 98: SI-75P8 Chain A Nucleotide Sequence
GAGGTGCAGCTGCAGGAGTCTGGCGGCGGCCTGGTGCAGGCTGGGGACAGCCTGAGCCTGTCCTGCCTGGTGTCTGG
CCGCTCCTTCAACTCCTACACCATGGGCTGGTTCCGCCAGGCCCCTGGGAAGGAGCGGGAGTTTGTGGCTGCCATCC
TGTGGAGTGGCCCCACCACCTACTATGCTGACTCTGTGAAGGGCCGCTTCACCATCTCCAGAGACAATGCCAAGAAC
ACTGTGTACCTGCAGATGAACAGCCTGAAGCCAGAGGACACAGCTGTGTACTACTGTGCTGCTGCCCTGGGAGTGCT
GGTGCTGGCCCCTGGCAATGTGTACAGCTACTGGGGCCAGGGCACCCAGGTGACTGTCTCGAGCGGCGGTGGAGGGT
CCGGCGGTGGTGGATCACAAGTGCAGTTGCAAGAAAGTGGTGGTAGACTGGTTCAGCCTGGTGAACCCTTGTCACTG
ACGTGTAAAACAAGCGGCATTGATCTGTCCTCTAACGCCATCGGATGGGTCCGACAGGCCCCAGGAAAAGGTCTGGA
GTGGATCGGAGTTATCTTCGGGAGCGGCAATACATACTACGCAAGCTGGGCAAAAGGGCGATTTACGATATCACGGA
GCACCTCTACAGTTTATTTGAAAATGAACTCCCTCCGGTCCGAGGATACCGCGATATATTACTGTGCCAGAGGGGGG
TACTCCTCTGATATCTGGGGGCAGGGTACACTGGTTACAGTTTCATCCGCTAGCACCAAAGGCCCCTCTGTGTTCCC
TCTGGCCCCCTCCTCCAAGAGCACCTCTGGAGGCACTGCTGCCCTGGGCTGCCTGGTGAAGGACTACTTCCCAGAGC
CTGTGACTGTGTCCTGGAACTCTGGAGCCCTGACCTCTGGAGTGCACACCTTCCCTGCTGTGCTGCAGAGCTCTGGC
CTCTACAGCCTGTCCTCTGTGGTCACTGTGCCCTCCTCCAGCCTGGGCACCCAGACCTACATCTGCAATGTGAACCA
CAAGCCCTCCAACACCAAGGTGGACAAGAGAGTGGAGCCCAAGTCCTGTGACAAGACCCACACCTGCCCTCCCTGCC
CAGCCCCAGAGGCTGCTGGAGGCCCCTCTGTGTTCCTCTTCCCTCCCAAGCCCAAGGACACCCTGATGATCTCCAGG
ACCCCAGAAGTCACCTGTGTGGTGGTGGATGTGTCCCATGAAGACCCAGAAGTGAAGTTCAACTGGTATGTGGATGG
AGTGGAGGTGCACAATGCCAAGACCAAGCCCAGAGAAGAGCAGTACAACTCCACCTACCGAGTGGTGTCTGTGCTGA
CTGTGCTGCACCAGGACTGGCTGAATGGGAAGGAGTACAAGTGTGCTGTGTCCAACAAGGCCCTGCCTGCCCCCATT
GAGAAGACCATCTCCAAGGCCAAGGGCCAGCCCAGAGAGCCCCAGGTCTACACCCTGCCTCCCTCCAGAGATGAGCT
GACCAAGAACCAGGTGTCCCTGTCCTGTGCTGTGAAAGGCTTCTACCCCAGTGACATTGCTGTGGAGTGGGAGAGCA
ATGGCCAGCCAGAGAACAACTACAAGACCACCCCTCCTGTGCTGGACTCTGATGGCTCCTTCTTCCTGGTCTCCAAG
CTGACTGTGGACAAGAGCCGCTGGCAGCAGGGCAATGTGTTCTCCTGCTCTGTCATGCATGAGGCCCTGCACAACCA
CTACACCCAGAAGAGCCTGAGCCTGAGCCCTGGAGGAGGAGGAGGCTCTGGAGGAGGAGGATCCCAAGTTCAGTTGC
AGCAGTCTGGCCCTGGCCTGGTCAAGCCTTCTGAGACACTGTCCATCACCTGTACCGTGTCCGGCTTCTCCCTGACC
AATTACGGCGTGCACTGGATCAGACAGGCCCCTGGCAAAGGACTGGAATGGCTGGGAGTGATTTGGAGCGGCGGCAA
CACCGACTACAACACCCCTTTCACCAGCCGGTTCACCATCACCAAGGACAACTCCAAGAACCAGGTGTACTTCAAGC
TGCGGAGCGTGCGGGCTGATGACACCGCCATCTACTACTGTGCTCGGGCCCTGACCTACTACGACTACGAGTTTGCT
TACTGGGGCCAGGGCACCCTGGTCACAGTTTCTTCTGGTGGTGGTGGTTCAGGCGGGGGGGGTTCCGGCGGAGGCGG
TTCTGGGGGTGGAGGTTCCGAGATCGTGCTGACCCAGTCTCCTTCCACACTGTCTGTGTCTCCCGGCGAGAGAGCCA
CCTTCAGCTGTAGAGCCTCTCAGTCCATCGGCACCAACATCCACTGGTATCAGCAGAAGCCCGGCAAGCCTCCTCGG
CTGCTGATTAAGTACGCCTCCGAGTCCATCAGCGGCATCCCTGACAGATTCTCCGGCTCTGGCTCTGGCACCGAGTT
TACCCTGACCATCTCCTCCGTGCAGTCCGAGGATTTCGCCGTGTACTACTGCCAGCAGAACAACAACTGGCCCACCA
CCTTTGGACCCGGCACCAAGCTGACCGTGCTGTGA
>Sequence ID 99: SI-75P8 Chain B Amino Acid Sequence
QVQLVQSGGGLVQAGGSLSLSCAFSGRTFSMYTMGWFRQAPGKEREFVAANRGRGLSPDIADSVNGRFTISRDNAKN
TLYLQMDSLKPEDTAVYYCAADLQYGSSWPQRSSAEYDYWGQGTTVTVSSGGGGSGGGGSDPQLTQSPSSLSATVGQ
RVTINCQSSQSVAKNNNLAWFQQKPGKPPKLLIYSASTLAAGVPSRFSGSGSGTQFTLTITRVQSEDFATYYCSARD
SGNIQSFGGGTRVEIKRTVAAPSVFIFPPSDEQLKSGTASVVCLLNNFYPREAKVQWKVDNALQSGNSQESVTEQDS
KDSTYSLSSTLTLSKADYEKHKVYACEVTHQGLSSPVTKSFNRGECGGDKTHTCPPCPAPEAAGGPSVFLFPPKPKD
TLMISRTPEVTCVVVDVSHEDPEVKFNWYVDGVEVHNAKTKPREEQYNSTYRVVSVLTVLHQDWLNGKEYKCAVSNK
ALPAPIEKTISKAKGQPREPQVYTLPPSRDELTKNQVSLWCLVKGFYPSDIAVEWESNGQPENNYKTTPPVLDSDGS
FFLYSKLTVDKSRWQQGNVFSCSVMHEALHNRFTQKSLSLSPGGGGGSGGGGSQVQLQESGGGLVKPGGSLSLSCAA
SGFTFSSYWMSWVRQAPGKGLEWVANINRDGSASYYVDSVKGRFTISRDDAKNSLYLQMNSLRAEDTAVYYCARDRG
VGYFDLWGRGTLVTVSSGGGGSGGGGSGGGGSQSALTQPASVSGSPGQSITISCTGTSSDVGGYNFVSWYQQHPGKA
PKLMIYDVSDRPSGVSDRFSGSKSGNTASLIISGLQADDEADYYCSSYGSSSTHVIFGGGTKVTVL
>Sequence ID 100: SI-75P8 Chain B Nucleotide Sequence
CAGGTGCAGCTGGTGCAGTCTGGCGGAGGCCTGGTGCAGGCTGGGGGCAGCCTGAGCCTGAGCTGTGCCTTCTCTGG
CCGCACCTTCTCCATGTACACCATGGGCTGGTTCCGCCAGGCCCCAGGGAAGGAGAGAGAGTTTGTGGCTGCCAACA
GAGGCAGAGGCCTGAGCCCAGACATTGCTGACTCTGTGAATGGCCGCTTCACCATCTCCAGAGACAATGCCAAGAAC
ACCCTGTACCTGCAGATGGACAGCCTGAAGCCAGAGGACACAGCTGTGTACTACTGTGCTGCTGACCTGCAGTATGG
CAGCAGCTGGCCTCAGAGGAGCTCTGCTGAGTATGACTACTGGGGCCAGGGCACCACTGTGACTGTCTCGAGTGGCG
GTGGAGGGTCCGGCGGTGGTGGATCAGATCCTCAATTGACCCAGTCCCCTAGTAGCCTTTCTGCAACCGTGGGCCAG
AGGGTAACAATCAATTGCCAGTCAAGCCAGTCCGTAGCGAAGAATAATAATTTGGCATGGTTCCAACAAAAACCGGG
TAAACCTCCTAAACTCCTTATCTACTCAGCTTCAACCCTTGCCGCGGGTGTGCCCAGCCGGTTCTCAGGCTCAGGTT
CCGGGACTCAATTTACACTTACCATCACTCGCGTCCAAAGTGAGGATTTTGCAACCTACTATTGTTCTGCACGGGAT
TCCGGGAACATACAGTCCTTTGGGGGTGGAACTCGGGTGGAGATAAAACGTACGGTGGCTGCCCCCTCTGTGTTCAT
CTTCCCACCCAGTGATGAGCAGCTGAAGAGTGGCACAGCCTCTGTGGTGTGCCTGCTCAACAACTTCTACCCCAGAG
AAGCCAAGGTGCAGTGGAAGGTGGACAATGCCCTGCAGAGTGGCAACAGCCAGGAGAGTGTGACAGAGCAGGACAGC
AAGGACAGCACCTACAGCCTGTCCTCCACCCTGACCCTGTCCAAGGCTGACTATGAGAAGCACAAGGTGTATGCCTG
TGAGGTGACCCACCAGGGCCTGAGCAGCCCTGTGACCAAGAGCTTCAACCGAGGAGAGTGTGGAGGAGACAAGACCC
ACACCTGCCCTCCCTGCCCAGCCCCAGAAGCTGCTGGAGGCCCCTCTGTGTTCCTCTTCCCTCCCAAGCCCAAGGAC
ACCCTGATGATCTCCAGGACCCCAGAAGTCACCTGTGTGGTGGTGGATGTGTCCCATGAAGACCCAGAAGTGAAGTT
CAACTGGTATGTGGATGGAGTGGAAGTGCACAATGCCAAGACCAAGCCCAGAGAAGAGCAGTACAACAGCACCTACC
GAGTGGTGTCTGTGCTGACTGTGCTGCACCAGGACTGGCTGAATGGGAAGGAGTACAAGTGTGCTGTGTCCAACAAG
GCCCTGCCTGCCCCCATTGAGAAGACCATCTCCAAGGCCAAGGGCCAGCCCAGAGAGCCCCAGGTCTACACCCTGCC
TCCCTCCAGAGATGAGCTGACCAAGAACCAGGTGTCCCTGTGGTGCCTGGTGAAAGGCTTCTACCCCAGTGACATTG
CTGTGGAGTGGGAGAGCAATGGCCAGCCAGAGAACAACTACAAGACCACCCCTCCTGTGCTGGACTCTGATGGCTCC
TTCTTCCTGTACAGCAAGCTGACTGTGGACAAGAGCCGCTGGCAGCAGGGCAATGTGTTCTCCTGCTCTGTCATGCA
TGAGGCCCTGCACAACCGCTTCACCCAGAAGAGCCTGAGCCTGAGCCCTGGAGGAGGAGGAGGCTCTGGAGGAGGAG
GATCCCAGGTGCAGCTGCAGGAGTCGGGGGGAGGCCTGGTCAAGCCTGGAGGGTCCCTGAGCCTCTCCTGTGCAGCC
TCTGGATTCACCTTTAGTAGTTATTGGATGAGCTGGGTCCGCCAGGCTCCAGGGAAGGGGCTGGAGTGGGTGGCCAA
CATAAACCGCGATGGAAGTGCGAGTTACTATGTGGACTCTGTGAAGGGCCGATTCACCATCTCCAGAGACGACGCCA
AGAACTCACTGTATCTGCAAATGAACAGCCTGAGAGCTGAGGACACGGCTGTGTATTACTGTGCGAGAGATCGTGGG
GTGGGCTACTTCGATCTCTGGGGCCGTGGCACCCTGGTCACCGTGTCTAGCGGTGGAGGCGGTTCAGGCGGAGGTGG
TTCCGGCGGTGGCGGCTCCCAGTCTGCCCTGACTCAGCCTGCCTCCGTGTCTGGGTCTCCTGGACAGTCGATCACCA
TCTCCTGCACTGGAACCAGCAGTGACGTTGGTGGTTATAACTTTGTCTCCTGGTACCAACAACACCCAGGCAAAGCC
CCCAAACTCATGATCTATGATGTCAGTGATCGGCCCTCAGGGGTGTCTGATCGCTTCTCCGGCTCCAAGTCTGGCAA
CACGGCCTCCCTGATCATCTCTGGCCTCCAGGCTGACGACGAGGCTGATTATTACTGCAGCTCATATGGGAGCAGCA
GCACTCATGTGATTTTCGGCGGAGGGACCAAGGTGACCGTCCTATAA
>Sequence ID 101: SI-75X4 Chain A Amino Acid Sequence
EVQLQESGGGLVQAGDSLSLSCLVSGRSFNSYTMGWFRQAPGKEREFVAAILWSGPTTYYADSVKGRFTISRDNAKN
TVYLQMNSLKPEDTAVYYCAAALGVLVLAPGNVYSYWGQGTQVTVSSGGGGSGGGGSEVQLVESGGGLVQPGGSLRL
SCAASGFTISTNAMSWVRQAPGKGLEWIGVITGRDITYYASWAKGRFTISRDNSKNTLYLQMSSLRSEDTAVYYCAR
DGGSSAITSNNIWGQGTLVTVSSASTKGPSVFPLAPSSKSTSGGTAALGCLVKDYFPEPVTVSWNSGALTSGVHTFP
AVLQSSGLYSLSSVVTVPSSSLGTQTYICNVNHKPSNTKVDKRVEPKSCDKTHTCPPCPAPEAAGGPSVFLFPPKPK
DTLMISRTPEVTCVVVDVSHEDPEVKFNWYVDGVEVHNAKTKPREEQYNSTYRVVSVLTVLHQDWLNGKEYKCAVSN
KALPAPIEKTISKAKGQPREPQVYTLPPSRDELTKNQVSLSCAVKGFYPSDIAVEWESNGQPENNYKTTPPVLDSDG
SFFLVSKLTVDKSRWQQGNVFSCSVMHEALHNHYTQKSLSLSPG
>Sequence ID 102: SI-75X4 Chain A Nucleotide Sequence
GAGGTGCAGCTGCAGGAGTCTGGCGGCGGCCTGGTGCAGGCTGGGGACAGCCTGAGCCTGTCCTGCCTGGTGTCTGG
CCGCTCCTTCAACTCCTACACCATGGGCTGGTTCCGCCAGGCCCCTGGGAAGGAGCGGGAGTTTGTGGCTGCCATCC
TGTGGAGTGGCCCCACCACCTACTATGCTGACTCTGTGAAGGGCCGCTTCACCATCTCCAGAGACAATGCCAAGAAC
ACTGTGTACCTGCAGATGAACAGCCTGAAGCCAGAGGACACAGCTGTGTACTACTGTGCTGCTGCCCTGGGAGTGCT
GGTGCTGGCCCCTGGCAATGTGTACAGCTACTGGGGCCAGGGCACCCAGGTGACTGTCTCGAGCGGAGGAGGAGGCT
CTGGAGGAGGAGGCAGTGAGGTGCAGCTGGTGGAGAGTGGAGGAGGCCTGGTGCAGCCTGGAGGCAGCCTGCGGCTG
TCCTGTGCTGCCTCTGGCTTCACCATCTCCACCAATGCCATGTCCTGGGTGCGCCAGGCCCCTGGCAAGGGCCTGGA
GTGGATTGGAGTCATCACTGGCAGAGACATCACCTACTATGCCTCCTGGGCCAAAGGCCGCTTCACCATCTCCAGAG
ACAACAGCAAGAACACCCTGTACCTGCAGATGAGCAGCCTGCGCAGTGAGGACACAGCTGTGTACTACTGTGCCCGA
GATGGAGGCAGCAGTGCCATCACCTCCAACAACATCTGGGGCCAGGGCACCCTGGTCACTGTGTCCTCTGCTAGCAC
CAAAGGCCCCTCTGTGTTCCCTCTGGCCCCCTCCTCCAAGAGCACCTCTGGAGGCACTGCTGCCCTGGGCTGCCTGG
TGAAGGACTACTTCCCAGAGCCTGTGACTGTGTCCTGGAACTCTGGAGCCCTGACCTCTGGAGTGCACACCTTCCCT
GCTGTGCTGCAGAGCTCTGGCCTCTACAGCCTGTCCTCTGTGGTCACTGTGCCCTCCTCCAGCCTGGGCACCCAGAC
CTACATCTGCAATGTGAACCACAAGCCCTCCAACACCAAGGTGGACAAGAGAGTGGAGCCCAAGTCCTGTGACAAGA
CCCACACCTGCCCTCCCTGCCCAGCCCCAGAGGCTGCTGGAGGCCCCTCTGTGTTCCTCTTCCCTCCCAAGCCCAAG
GACACCCTGATGATCTCCAGGACCCCAGAAGTCACCTGTGTGGTGGTGGATGTGTCCCATGAAGACCCAGAAGTGAA
GTTCAACTGGTATGTGGATGGAGTGGAGGTGCACAATGCCAAGACCAAGCCCAGAGAAGAGCAGTACAACTCCACCT
ACCGAGTGGTGTCTGTGCTGACTGTGCTGCACCAGGACTGGCTGAATGGGAAGGAGTACAAGTGTGCTGTGTCCAAC
AAGGCCCTGCCTGCCCCCATTGAGAAGACCATCTCCAAGGCCAAGGGCCAGCCCAGAGAGCCCCAGGTCTACACCCT
GCCTCCCTCCAGAGATGAGCTGACCAAGAACCAGGTGTCCCTGTCCTGTGCTGTGAAAGGCTTCTACCCCAGTGACA
TTGCTGTGGAGTGGGAGAGCAATGGCCAGCCAGAGAACAACTACAAGACCACCCCTCCTGTGCTGGACTCTGATGGC
TCCTTCTTCCTGGTCTCCAAGCTGACTGTGGACAAGAGCCGCTGGCAGCAGGGCAATGTGTTCTCCTGCTCTGTCAT
GCATGAGGCCCTGCACAACCACTACACCCAGAAGAGCCTGAGCCTGAGCCCTGGATGA
>Sequence ID 103: SI-75X4 Chain B Amino Acid Sequence
QVQLVQSGGGLVQAGGSLSLSCAFSGRTFSMYTMGWFRQAPGKEREFVAANRGRGLSPDIADSVNGRFTISRDNAKN
TLYLQMDSLKPEDTAVYYCAADLQYGSSWPQRSSAEYDYWGQGTTVTVSSGGGGSGGGGSDVVMTQSPSTLSASVGD
RVTINCQASESISSWLAWYQQKPGKAPKLLIYEASKLASGVPSRFSGSGSGTEFTLTISSLQPDDFATYYCQGYFYF
ISRTYVNSFGGGTKVEIKRTVAAPSVFIFPPSDEQLKSGTASVVCLLNNFYPREAKVQWKVDNALQSGNSQESVTEQ
DSKDSTYSLSSTLTLSKADYEKHKVYACEVTHQGLSSPVTKSFNRGECGGDKTHTCPPCPAPEAAGGPSVFLFPPKP
KDTLMISRTPEVTCVVVDVSHEDPEVKFNWYVDGVEVHNAKTKPREEQYNSTYRVVSVLTVLHQDWLNGKEYKCAVS
NKALPAPIEKTISKAKGQPREPQVYTLPPSRDELTKNQVSLWCLVKGFYPSDIAVEWESNGQPENNYKTTPPVLDSD
GSFFLYSKLTVDKSRWQQGNVFSCSVMHEALHNRFTQKSLSLSPG
>Sequence ID 104: SI-75X4 Chain B Nucleotide Sequence
CAGGTGCAGCTGGTGCAGTCTGGCGGAGGCCTGGTGCAGGCTGGGGGCAGCCTGAGCCTGAGCTGTGCCTTCTCTGG
CCGCACCTTCTCCATGTACACCATGGGCTGGTTCCGCCAGGCCCCAGGGAAGGAGAGAGAGTTTGTGGCTGCCAACA
GAGGCAGAGGCCTGAGCCCAGACATTGCTGACTCTGTGAATGGCCGCTTCACCATCTCCAGAGACAATGCCAAGAAC
ACCCTGTACCTGCAGATGGACAGCCTGAAGCCAGAGGACACAGCTGTGTACTACTGTGCTGCTGACCTGCAGTATGG
CAGCAGCTGGCCTCAGAGGAGCTCTGCTGAGTATGACTACTGGGGCCAGGGCACCACTGTGACTGTCTCGAGCGGAG
GAGGAGGCTCTGGAGGAGGAGGCAGTGATGTGGTGATGACCCAGAGCCCCTCCACCCTGTCTGCCTCTGTGGGAGAC
AGAGTGACCATCAACTGCCAGGCCAGTGAGAGCATCTCCTCCTGGCTGGCCTGGTACCAGCAGAAGCCAGGCAAGGC
CCCCAAGCTGCTCATCTATGAAGCCTCCAAGCTGGCCTCTGGAGTGCCCTCCCGCTTCTCTGGCTCTGGCTCTGGCA
CAGAGTTCACCCTGACCATCTCCAGCCTGCAGCCAGATGACTTTGCCACCTACTACTGCCAGGGCTACTTCTACTTC
ATCTCCAGGACCTATGTGAACAGCTTTGGAGGAGGCACCAAGGTGGAGATCAAGCGTACGGTGGCTGCCCCCTCTGT
GTTCATCTTCCCACCCAGTGATGAGCAGCTGAAGAGTGGCACAGCCTCTGTGGTGTGCCTGCTCAACAACTTCTACC
CCAGAGAAGCCAAGGTGCAGTGGAAGGTGGACAATGCCCTGCAGAGTGGCAACAGCCAGGAGAGTGTGACAGAGCAG
GACAGCAAGGACAGCACCTACAGCCTGTCCTCCACCCTGACCCTGTCCAAGGCTGACTATGAGAAGCACAAGGTGTA
TGCCTGTGAGGTGACCCACCAGGGCCTGAGCAGCCCTGTGACCAAGAGCTTCAACCGAGGAGAGTGTGGAGGAGACA
AGACCCACACCTGCCCTCCCTGCCCAGCCCCAGAAGCTGCTGGAGGCCCCTCTGTGTTCCTCTTCCCTCCCAAGCCC
AAGGACACCCTGATGATCTCCAGGACCCCAGAAGTCACCTGTGTGGTGGTGGATGTGTCCCATGAAGACCCAGAAGT
GAAGTTCAACTGGTATGTGGATGGAGTGGAAGTGCACAATGCCAAGACCAAGCCCAGAGAAGAGCAGTACAACAGCA
CCTACCGAGTGGTGTCTGTGCTGACTGTGCTGCACCAGGACTGGCTGAATGGGAAGGAGTACAAGTGTGCTGTGTCC
AACAAGGCCCTGCCTGCCCCCATTGAGAAGACCATCTCCAAGGCCAAGGGCCAGCCCAGAGAGCCCCAGGTCTACAC
CCTGCCTCCCTCCAGAGATGAGCTGACCAAGAACCAGGTGTCCCTGTGGTGCCTGGTGAAAGGCTTCTACCCCAGTG
ACATTGCTGTGGAGTGGGAGAGCAATGGCCAGCCAGAGAACAACTACAAGACCACCCCTCCTGTGCTGGACTCTGAT
GGCTCCTTCTTCCTGTACAGCAAGCTGACTGTGGACAAGAGCCGCTGGCAGCAGGGCAATGTGTTCTCCTGCTCTGT
CATGCATGAGGCCCTGCACAACCGCTTCACCCAGAAGAGCCTGAGCCTGAGCCCTGGATGA
>Sequence ID 105: SI-75X17 Chain A Amino Acid Sequence
EVQLQESGGGLVQAGDSLSLSCLVSGRSFNSYTMGWFRQAPGKEREFVAAILWSGPTTYYADSVKGRFTISRDNAKN
TVYLQMNSLKPEDTAVYYCAAALGVLVLAPGNVYSYWGQGTQVTVSSGGGGSGGGGSQVQLQESGGRLVQPGEPLSL
TCKTSGIDLSSNAIGWVRQAPGKGLEWIGVIFGSGNTYYASWAKGRFTISRSTSTVYLKMNSLRSEDTAIYYCARGG
YSSDIWGQGTLVTVSSASTKGPSVFPLAPSSKSTSGGTAALGCLVKDYFPEPVTVSWNSGALTSGVHTFPAVLQSSG
LYSLSSVVTVPSSSLGTQTYICNVNHKPSNTKVDKRVEPKSCDKTHTCPPCPAPEAAGGPSVFLFPPKPKDTLMISR
TPEVTCVVVDVSHEDPEVKFNWYVDGVEVHNAKTKPREEQYNSTYRVVSVLTVLHQDWLNGKEYKCAVSNKALPAPI
EKTISKAKGQPREPQVYTLPPSRDELTKNQVSLSCAVKGFYPSDIAVEWESNGQPENNYKTTPPVLDSDGSFFLVSK
LTVDKSRWQQGNVFSCSVMHEALHNHYTQKSLSLSPG
>Sequence ID 106: SI-75X17 Chain A Nucleotide Sequence
GAGGTGCAGCTGCAGGAGTCTGGCGGCGGCCTGGTGCAGGCTGGGGACAGCCTGAGCCTGTCCTGCCTGGTGTCTGG
CCGCTCCTTCAACTCCTACACCATGGGCTGGTTCCGCCAGGCCCCTGGGAAGGAGCGGGAGTTTGTGGCTGCCATCC
TGTGGAGTGGCCCCACCACCTACTATGCTGACTCTGTGAAGGGCCGCTTCACCATCTCCAGAGACAATGCCAAGAAC
ACTGTGTACCTGCAGATGAACAGCCTGAAGCCAGAGGACACAGCTGTGTACTACTGTGCTGCTGCCCTGGGAGTGCT
GGTGCTGGCCCCTGGCAATGTGTACAGCTACTGGGGCCAGGGCACCCAGGTGACTGTCTCGAGCGGCGGTGGAGGGT
CCGGCGGTGGTGGATCACAAGTGCAGTTGCAAGAAAGTGGTGGTAGACTGGTTCAGCCTGGTGAACCCTTGTCACTG
ACGTGTAAAACAAGCGGCATTGATCTGTCCTCTAACGCCATCGGATGGGTCCGACAGGCCCCAGGAAAAGGTCTGGA
GTGGATCGGAGTTATCTTCGGGAGCGGCAATACATACTACGCAAGCTGGGCAAAAGGGCGATTTACGATATCACGGA
GCACCTCTACAGTTTATTTGAAAATGAACTCCCTCCGGTCCGAGGATACCGCGATATATTACTGTGCCAGAGGGGGG
TACTCCTCTGATATCTGGGGGCAGGGTACACTGGTTACAGTTTCATCCGCTAGCACCAAAGGCCCCTCTGTGTTCCC
TCTGGCCCCCTCCTCCAAGAGCACCTCTGGAGGCACTGCTGCCCTGGGCTGCCTGGTGAAGGACTACTTCCCAGAGC
CTGTGACTGTGTCCTGGAACTCTGGAGCCCTGACCTCTGGAGTGCACACCTTCCCTGCTGTGCTGCAGAGCTCTGGC
CTCTACAGCCTGTCCTCTGTGGTCACTGTGCCCTCCTCCAGCCTGGGCACCCAGACCTACATCTGCAATGTGAACCA
CAAGCCCTCCAACACCAAGGTGGACAAGAGAGTGGAGCCCAAGTCCTGTGACAAGACCCACACCTGCCCTCCCTGCC
CAGCCCCAGAGGCTGCTGGAGGCCCCTCTGTGTTCCTCTTCCCTCCCAAGCCCAAGGACACCCTGATGATCTCCAGG
ACCCCAGAAGTCACCTGTGTGGTGGTGGATGTGTCCCATGAAGACCCAGAAGTGAAGTTCAACTGGTATGTGGATGG
AGTGGAGGTGCACAATGCCAAGACCAAGCCCAGAGAAGAGCAGTACAACTCCACCTACCGAGTGGTGTCTGTGCTGA
CTGTGCTGCACCAGGACTGGCTGAATGGGAAGGAGTACAAGTGTGCTGTGTCCAACAAGGCCCTGCCTGCCCCCATT
GAGAAGACCATCTCCAAGGCCAAGGGCCAGCCCAGAGAGCCCCAGGTCTACACCCTGCCTCCCTCCAGAGATGAGCT
GACCAAGAACCAGGTGTCCCTGTCCTGTGCTGTGAAAGGCTTCTACCCCAGTGACATTGCTGTGGAGTGGGAGAGCA
ATGGCCAGCCAGAGAACAACTACAAGACCACCCCTCCTGTGCTGGACTCTGATGGCTCCTTCTTCCTGGTCTCCAAG
CTGACTGTGGACAAGAGCCGCTGGCAGCAGGGCAATGTGTTCTCCTGCTCTGTCATGCATGAGGCCCTGCACAACCA
CTACACCCAGAAGAGCCTGAGCCTGAGCCCTGGATGA
>Sequence ID 107: SI-75X17 Chain B Amino Acid Sequence
QVQLVQSGGGLVQAGGSLSLSCAFSGRTFSMYTMGWFRQAPGKEREFVAANRGRGLSPDIADSVNGRFTISRDNAKN
TLYLQMDSLKPEDTAVYYCAADLQYGSSWPQRSSAEYDYWGQGTTVTVSSGGGGSGGGGSDPQLTQSPSSLSATVGQ
RVTINCQSSQSVAKNNNLAWFQQKPGKPPKLLIYSASTLAAGVPSRFSGSGSGTQFTLTITRVQSEDFATYYCSARD
SGNIQSFGGGTRVEIKRTVAAPSVFIFPPSDEQLKSGTASVVCLLNNFYPREAKVQWKVDNALQSGNSQESVTEQDS
KDSTYSLSSTLTLSKADYEKHKVYACEVTHQGLSSPVTKSFNRGECGGDKTHTCPPCPAPEAAGGPSVFLFPPKPKD
TLMISRTPEVTCVVVDVSHEDPEVKFNWYVDGVEVHNAKTKPREEQYNSTYRVVSVLTVLHQDWLNGKEYKCAVSNK
ALPAPIEKTISKAKGQPREPQVYTLPPSRDELTKNQVSLWCLVKGFYPSDIAVEWESNGQPENNYKTTPPVLDSDGS
FFLYSKLTVDKSRWQQGNVFSCSVMHEALHNRFTQKSLSLSPG
>Sequence ID 108: SI-75X17 Chain B Nucleotide Sequence
CAGGTGCAGCTGGTGCAGTCTGGCGGAGGCCTGGTGCAGGCTGGGGGCAGCCTGAGCCTGAGCTGTGCCTTCTCTGG
CCGCACCTTCTCCATGTACACCATGGGCTGGTTCCGCCAGGCCCCAGGGAAGGAGAGAGAGTTTGTGGCTGCCAACA
GAGGCAGAGGCCTGAGCCCAGACATTGCTGACTCTGTGAATGGCCGCTTCACCATCTCCAGAGACAATGCCAAGAAC
ACCCTGTACCTGCAGATGGACAGCCTGAAGCCAGAGGACACAGCTGTGTACTACTGTGCTGCTGACCTGCAGTATGG
CAGCAGCTGGCCTCAGAGGAGCTCTGCTGAGTATGACTACTGGGGCCAGGGCACCACTGTGACTGTCTCGAGTGGCG
GTGGAGGGTCCGGCGGTGGTGGATCAGATCCTCAATTGACCCAGTCCCCTAGTAGCCTTTCTGCAACCGTGGGCCAG
AGGGTAACAATCAATTGCCAGTCAAGCCAGTCCGTAGCGAAGAATAATAATTTGGCATGGTTCCAACAAAAACCGGG
TAAACCTCCTAAACTCCTTATCTACTCAGCTTCAACCCTTGCCGCGGGTGTGCCCAGCCGGTTCTCAGGCTCAGGTT
CCGGGACTCAATTTACACTTACCATCACTCGCGTCCAAAGTGAGGATTTTGCAACCTACTATTGTTCTGCACGGGAT
TCCGGGAACATACAGTCCTTTGGGGGTGGAACTCGGGTGGAGATAAAACGTACGGTGGCTGCCCCCTCTGTGTTCAT
CTTCCCACCCAGTGATGAGCAGCTGAAGAGTGGCACAGCCTCTGTGGTGTGCCTGCTCAACAACTTCTACCCCAGAG
AAGCCAAGGTGCAGTGGAAGGTGGACAATGCCCTGCAGAGTGGCAACAGCCAGGAGAGTGTGACAGAGCAGGACAGC
AAGGACAGCACCTACAGCCTGTCCTCCACCCTGACCCTGTCCAAGGCTGACTATGAGAAGCACAAGGTGTATGCCTG
TGAGGTGACCCACCAGGGCCTGAGCAGCCCTGTGACCAAGAGCTTCAACCGAGGAGAGTGTGGAGGAGACAAGACCC
ACACCTGCCCTCCCTGCCCAGCCCCAGAAGCTGCTGGAGGCCCCTCTGTGTTCCTCTTCCCTCCCAAGCCCAAGGAC
ACCCTGATGATCTCCAGGACCCCAGAAGTCACCTGTGTGGTGGTGGATGTGTCCCATGAAGACCCAGAAGTGAAGTT
CAACTGGTATGTGGATGGAGTGGAAGTGCACAATGCCAAGACCAAGCCCAGAGAAGAGCAGTACAACAGCACCTACC
GAGTGGTGTCTGTGCTGACTGTGCTGCACCAGGACTGGCTGAATGGGAAGGAGTACAAGTGTGCTGTGTCCAACAAG
GCCCTGCCTGCCCCCATTGAGAAGACCATCTCCAAGGCCAAGGGCCAGCCCAGAGAGCCCCAGGTCTACACCCTGCC
TCCCTCCAGAGATGAGCTGACCAAGAACCAGGTGTCCCTGTGGTGCCTGGTGAAAGGCTTCTACCCCAGTGACATTG
CTGTGGAGTGGGAGAGCAATGGCCAGCCAGAGAACAACTACAAGACCACCCCTCCTGTGCTGGACTCTGATGGCTCC
TTCTTCCTGTACAGCAAGCTGACTGTGGACAAGAGCCGCTGGCAGCAGGGCAATGTGTTCTCCTGCTCTGTCATGCA
TGAGGCCCTGCACAACCGCTTCACCCAGAAGAGCCTGAGCCTGAGCCCTGGATGA
>Sequence ID 109: SI-75X19 Chain A Amino Acid Sequence
QVQLQESGGRLVQPGEPLSLTCKTSGIDLSSNAIGWVRQAPGKGLEWIGVIFGSGNTYYASWAKGRFTISRSTSTVY
LKMNSLRSEDTAIYYCARGGYSSDIWGQGTLVTVSSASTKGPSVFPLAPSSKSTSGGTAALGCLVKDYFPEPVTVSW
NSGALTSGVHTFPAVLQSSGLYSLSSVVTVPSSSLGTQTYICNVNHKPSNTKVDKRVEPKSCDKTHTCPPCPAPEAA
GGPSVFLFPPKPKDTLMISRTPEVTCVVVDVSHEDPEVKFNWYVDGVEVHNAKTKPREEQYNSTYRVVSVLTVLHQD
WLNGKEYKCAVSNKALPAPIEKTISKAKGQPREPQVYTLPPSRDELTKNQVSLSCAVKGFYPSDIAVEWESNGQPEN
NYKTTPPVLDSDGSFFLVSKLTVDKSRWQQGNVFSCSVMHEALHNHYTQKSLSLSPGGGGGSGGGGSEVQLQESGGG
LVQAGDSLSLSCLVSGRSFNSYTMGWFRQAPGKEREFVAAILWSGPTTYYADSVKGRFTISRDNAKNTVYLQMNSLK
PEDTAVYYCAAALGVLVLAPGNVYSYWGQGTQVTVSS
>Sequence ID 110: SI-75X19 Chain A Nucleotide Sequence
CAAGTGCAGTTGCAAGAAAGTGGTGGTAGACTGGTTCAGCCTGGTGAACCCTTGTCACTGACGTGTAAAACAAGCGG
CATTGATCTGTCCTCTAACGCCATCGGATGGGTCCGACAGGCCCCAGGAAAAGGTCTGGAGTGGATCGGAGTTATCT
TCGGGAGCGGCAATACATACTACGCAAGCTGGGCAAAAGGGCGATTTACGATATCACGGAGCACCTCTACAGTTTAT
TTGAAAATGAACTCCCTCCGGTCCGAGGATACCGCGATATATTACTGTGCCAGAGGGGGGTACTCCTCTGATATCTG
GGGGCAGGGTACACTGGTTACAGTTTCATCCGCTAGCACCAAAGGCCCCTCTGTGTTCCCTCTGGCCCCCTCCTCCA
AGAGCACCTCTGGAGGCACTGCTGCCCTGGGCTGCCTGGTGAAGGACTACTTCCCAGAGCCTGTGACTGTGTCCTGG
AACTCTGGAGCCCTGACCTCTGGAGTGCACACCTTCCCTGCTGTGCTGCAGAGCTCTGGCCTCTACAGCCTGTCCTC
TGTGGTCACTGTGCCCTCCTCCAGCCTGGGCACCCAGACCTACATCTGCAATGTGAACCACAAGCCCTCCAACACCA
AGGTGGACAAGAGAGTGGAGCCCAAGTCCTGTGACAAGACCCACACCTGCCCTCCCTGCCCAGCCCCAGAGGCTGCT
GGAGGCCCCTCTGTGTTCCTCTTCCCTCCCAAGCCCAAGGACACCCTGATGATCTCCAGGACCCCAGAAGTCACCTG
TGTGGTGGTGGATGTGTCCCATGAAGACCCAGAAGTGAAGTTCAACTGGTATGTGGATGGAGTGGAGGTGCACAATG
CCAAGACCAAGCCCAGAGAAGAGCAGTACAACTCCACCTACCGAGTGGTGTCTGTGCTGACTGTGCTGCACCAGGAC
TGGCTGAATGGGAAGGAGTACAAGTGTGCTGTGTCCAACAAGGCCCTGCCTGCCCCCATTGAGAAGACCATCTCCAA
GGCCAAGGGCCAGCCCAGAGAGCCCCAGGTCTACACCCTGCCTCCCTCCAGAGATGAGCTGACCAAGAACCAGGTGT
CCCTGTCCTGTGCTGTGAAAGGCTTCTACCCCAGTGACATTGCTGTGGAGTGGGAGAGCAATGGCCAGCCAGAGAAC
AACTACAAGACCACCCCTCCTGTGCTGGACTCTGATGGCTCCTTCTTCCTGGTCTCCAAGCTGACTGTGGACAAGAG
CCGCTGGCAGCAGGGCAATGTGTTCTCCTGCTCTGTCATGCATGAGGCCCTGCACAACCACTACACCCAGAAGAGCC
TGAGCCTGAGCCCTGGAGGAGGAGGAGGCTCTGGAGGAGGAGGATCCGAGGTGCAGCTGCAGGAGTCTGGCGGCGGC
CTGGTGCAGGCTGGGGACAGCCTGAGCCTGTCCTGCCTGGTGTCTGGCCGCTCCTTCAACTCCTACACCATGGGCTG
GTTCCGCCAGGCCCCTGGGAAGGAGCGGGAGTTTGTGGCTGCCATCCTGTGGAGTGGCCCCACCACCTACTATGCTG
ACTCTGTGAAGGGCCGCTTCACCATCTCCAGAGACAATGCCAAGAACACTGTGTACCTGCAGATGAACAGCCTGAAG
CCAGAGGACACAGCTGTGTACTACTGTGCTGCTGCCCTGGGAGTGCTGGTGCTGGCCCCTGGCAATGTGTACAGCTA
CTGGGGCCAGGGCACCCAGGTGACTGTGTCTAGCTGA
>Sequence ID 111: SI-75X19 Chain B Amino Acid Sequence
DPQLTQSPSSLSATVGQRVTINCQSSQSVAKNNNLAWFQQKPGKPPKLLIYSASTLAAGVPSRFSGSGSGTQFTLTI
TRVQSEDFATYYCSARDSGNIQSFGGGTRVEIKRTVAAPSVFIFPPSDEQLKSGTASVVCLLNNFYPREAKVQWKVD
NALQSGNSQESVTEQDSKDSTYSLSSTLTLSKADYEKHKVYACEVTHQGLSSPVTKSFNRGECGGDKTHTCPPCPAP
EAAGGPSVFLFPPKPKDTLMISRTPEVTCVVVDVSHEDPEVKFNWYVDGVEVHNAKTKPREEQYNSTYRVVSVLTVL
HQDWLNGKEYKCAVSNKALPAPIEKTISKAKGQPREPQVYTLPPSRDELTKNQVSLWCLVKGFYPSDIAVEWESNGQ
PENNYKTTPPVLDSDGSFFLYSKLTVDKSRWQQGNVFSCSVMHEALHNRFTQKSLSLSPGGGGGSGGGGSQVQLVQS
GGGLVQAGGSLSLSCAFSGRTFSMYTMGWFRQAPGKEREFVAANRGRGLSPDIADSVNGRFTISRDNAKNTLYLQMD
SLKPEDTAVYYCAADLQYGSSWPQRSSAEYDYWGQGTTVTVSS
>Sequence ID 112: SI-75X19 Chain B Nucleotide Sequence
GATCCTCAATTGACCCAGTCCCCTAGTAGCCTTTCTGCAACCGTGGGCCAGAGGGTAACAATCAATTGCCAGTCAAG
CCAGTCCGTAGCGAAGAATAATAATTTGGCATGGTTCCAACAAAAACCGGGTAAACCTCCTAAACTCCTTATCTACT
CAGCTTCAACCCTTGCCGCGGGTGTGCCCAGCCGGTTCTCAGGCTCAGGTTCCGGGACTCAATTTACACTTACCATC
ACTCGCGTCCAAAGTGAGGATTTTGCAACCTACTATTGTTCTGCACGGGATTCCGGGAACATACAGTCCTTTGGGGG
TGGAACTCGGGTGGAGATAAAACGTACGGTGGCTGCCCCCTCTGTGTTCATCTTCCCACCCAGTGATGAGCAGCTGA
AGAGTGGCACAGCCTCTGTGGTGTGCCTGCTCAACAACTTCTACCCCAGAGAAGCCAAGGTGCAGTGGAAGGTGGAC
AATGCCCTGCAGAGTGGCAACAGCCAGGAGAGTGTGACAGAGCAGGACAGCAAGGACAGCACCTACAGCCTGTCCTC
CACCCTGACCCTGTCCAAGGCTGACTATGAGAAGCACAAGGTGTATGCCTGTGAGGTGACCCACCAGGGCCTGAGCA
GCCCTGTGACCAAGAGCTTCAACCGAGGAGAGTGTGGAGGAGACAAGACCCACACCTGCCCTCCCTGCCCAGCCCCA
GAAGCTGCTGGAGGCCCCTCTGTGTTCCTCTTCCCTCCCAAGCCCAAGGACACCCTGATGATCTCCAGGACCCCAGA
AGTCACCTGTGTGGTGGTGGATGTGTCCCATGAAGACCCAGAAGTGAAGTTCAACTGGTATGTGGATGGAGTGGAAG
TGCACAATGCCAAGACCAAGCCCAGAGAAGAGCAGTACAACAGCACCTACCGAGTGGTGTCTGTGCTGACTGTGCTG
CACCAGGACTGGCTGAATGGGAAGGAGTACAAGTGTGCTGTGTCCAACAAGGCCCTGCCTGCCCCCATTGAGAAGAC
CATCTCCAAGGCCAAGGGCCAGCCCAGAGAGCCCCAGGTCTACACCCTGCCTCCCTCCAGAGATGAGCTGACCAAGA
ACCAGGTGTCCCTGTGGTGCCTGGTGAAAGGCTTCTACCCCAGTGACATTGCTGTGGAGTGGGAGAGCAATGGCCAG
CCAGAGAACAACTACAAGACCACCCCTCCTGTGCTGGACTCTGATGGCTCCTTCTTCCTGTACAGCAAGCTGACTGT
GGACAAGAGCCGCTGGCAGCAGGGCAATGTGTTCTCCTGCTCTGTCATGCATGAGGCCCTGCACAACCGCTTCACCC
AGAAGAGCCTGAGCCTGAGCCCTGGAGGAGGAGGAGGCTCTGGAGGAGGAGGATCCCAGGTGCAGCTGGTGCAGTCT
GGCGGAGGCCTGGTGCAGGCTGGGGGCAGCCTGAGCCTGAGCTGTGCCTTCTCTGGCCGCACCTTCTCCATGTACAC
CATGGGCTGGTTCCGCCAGGCCCCAGGGAAGGAGAGAGAGTTTGTGGCTGCCAACAGAGGCAGAGGCCTGAGCCCAG
ACATTGCTGACTCTGTGAATGGCCGCTTCACCATCTCCAGAGACAATGCCAAGAACACCCTGTACCTGCAGATGGAC
AGCCTGAAGCCAGAGGACACAGCTGTGTACTACTGTGCTGCTGACCTGCAGTATGGCAGCAGCTGGCCTCAGAGGAG
CTCTGCTGAGTATGACTACTGGGGCCAGGGCACCACTGTGACTGTGTCTAGCTGA
>Sequence ID 113: SI-75X9 Chain A Amino Acid Sequence
QVQLQESGGRLVQPGEPLSLTCKTSGIDLSSNAIGWVRQAPGKGLEWIGVIFGSGNTYYASWAKGRFTISRSTSTVY
LKMNSLRSEDTAIYYCARGGYSSDIWGQGTLVTVSSASTKGPSVFPLAPSSKSTSGGTAALGCLVKDYFPEPVTVSW
NSGALTSGVHTFPAVLQSSGLYSLSSVVTVPSSSLGTQTYICNVNHKPSNTKVDKRVEPKSCDKTHTCPPCPAPEAA
GGPSVFLFPPKPKDTLMISRTPEVTCVVVDVSHEDPEVKFNWYVDGVEVHNAKTKPREEQYNSTYRVVSVLTVLHQD
WLNGKEYKCAVSNKALPAPIEKTISKAKGQPREPQVYTLPPSRDELTKNQVSLSCAVKGFYPSDIAVEWESNGQPEN
NYKTTPPVLDSDGSFFLVSKLTVDKSRWQQGNVFSCSVMHEALHNHYTQKSLSLSPG
>Sequence ID 114: SI-75X9 Chain A Nucleotide Sequence
CAAGTGCAGTTGCAAGAAAGTGGTGGTAGACTGGTTCAGCCTGGTGAACCCTTGTCACTGACGTGTAAAACAAGCGG
CATTGATCTGTCCTCTAACGCCATCGGATGGGTCCGACAGGCCCCAGGAAAAGGTCTGGAGTGGATCGGAGTTATCT
TCGGGAGCGGCAATACATACTACGCAAGCTGGGCAAAAGGGCGATTTACGATATCACGGAGCACCTCTACAGTTTAT
TTGAAAATGAACTCCCTCCGGTCCGAGGATACCGCGATATATTACTGTGCCAGAGGGGGGTACTCCTCTGATATCTG
GGGGCAGGGTACACTGGTTACAGTTTCATCCGCTAGCACCAAAGGCCCCTCTGTGTTCCCTCTGGCCCCCTCCTCCA
AGAGCACCTCTGGAGGCACTGCTGCCCTGGGCTGCCTGGTGAAGGACTACTTCCCAGAGCCTGTGACTGTGTCCTGG
AACTCTGGAGCCCTGACCTCTGGAGTGCACACCTTCCCTGCTGTGCTGCAGAGCTCTGGCCTCTACAGCCTGTCCTC
TGTGGTCACTGTGCCCTCCTCCAGCCTGGGCACCCAGACCTACATCTGCAATGTGAACCACAAGCCCTCCAACACCA
AGGTGGACAAGAGAGTGGAGCCCAAGTCCTGTGACAAGACCCACACCTGCCCTCCCTGCCCAGCCCCAGAGGCTGCT
GGAGGCCCCTCTGTGTTCCTCTTCCCTCCCAAGCCCAAGGACACCCTGATGATCTCCAGGACCCCAGAAGTCACCTG
TGTGGTGGTGGATGTGTCCCATGAAGACCCAGAAGTGAAGTTCAACTGGTATGTGGATGGAGTGGAGGTGCACAATG
CCAAGACCAAGCCCAGAGAAGAGCAGTACAACTCCACCTACCGAGTGGTGTCTGTGCTGACTGTGCTGCACCAGGAC
TGGCTGAATGGGAAGGAGTACAAGTGTGCTGTGTCCAACAAGGCCCTGCCTGCCCCCATTGAGAAGACCATCTCCAA
GGCCAAGGGCCAGCCCAGAGAGCCCCAGGTCTACACCCTGCCTCCCTCCAGAGATGAGCTGACCAAGAACCAGGTGT
CCCTGTCCTGTGCTGTGAAAGGCTTCTACCCCAGTGACATTGCTGTGGAGTGGGAGAGCAATGGCCAGCCAGAGAAC
AACTACAAGACCACCCCTCCTGTGCTGGACTCTGATGGCTCCTTCTTCCTGGTCTCCAAGCTGACTGTGGACAAGAG
CCGCTGGCAGCAGGGCAATGTGTTCTCCTGCTCTGTCATGCATGAGGCCCTGCACAACCACTACACCCAGAAGAGCC
TGAGCCTGAGCCCTGGATGA
>Sequence ID 115: SI-75X9 Chain B Amino Acid Sequence
QVQLVQSGGGLVQAGGSLSLSCAFSGRTFSMYTMGWFRQAPGKEREFVAANRGRGLSPDIADSVNGRFTISRDNAKN
TLYLQMDSLKPEDTAVYYCAADLQYGSSWPQRSSAEYDYWGQGTTVTVSSGGGGSGGGGSDPQLTQSPSSLSATVGQ
RVTINCQSSQSVAKNNNLAWFQQKPGKPPKLLIYSASTLAAGVPSRFSGSGSGTQFTLTITRVQSEDFATYYCSARD
SGNIQSFGGGTRVEIKRTVAAPSVFIFPPSDEQLKSGTASVVCLLNNFYPREAKVQWKVDNALQSGNSQESVTEQDS
KDSTYSLSSTLTLSKADYEKHKVYACEVTHQGLSSPVTKSFNRGECGGDKTHTCPPCPAPEAAGGPSVFLFPPKPKD
TLMISRTPEVTCVVVDVSHEDPEVKFNWYVDGVEVHNAKTKPREEQYNSTYRVVSVLTVLHQDWLNGKEYKCAVSNK
ALPAPIEKTISKAKGQPREPQVYTLPPSRDELTKNQVSLWCLVKGFYPSDIAVEWESNGQPENNYKTTPPVLDSDGS
FFLYSKLTVDKSRWQQGNVFSCSVMHEALHNRFTQKSLSLSPG
>Sequence ID 116: SI-75X9 Chain B Nucleotide Sequence
CAGGTGCAGCTGGTGCAGTCTGGCGGAGGCCTGGTGCAGGCTGGGGGCAGCCTGAGCCTGAGCTGTGCCTTCTCTGG
CCGCACCTTCTCCATGTACACCATGGGCTGGTTCCGCCAGGCCCCAGGGAAGGAGAGAGAGTTTGTGGCTGCCAACA
GAGGCAGAGGCCTGAGCCCAGACATTGCTGACTCTGTGAATGGCCGCTTCACCATCTCCAGAGACAATGCCAAGAAC
ACCCTGTACCTGCAGATGGACAGCCTGAAGCCAGAGGACACAGCTGTGTACTACTGTGCTGCTGACCTGCAGTATGG
CAGCAGCTGGCCTCAGAGGAGCTCTGCTGAGTATGACTACTGGGGCCAGGGCACCACTGTGACTGTCTCGAGTGGCG
GTGGAGGGTCCGGCGGTGGTGGATCAGATCCTCAATTGACCCAGTCCCCTAGTAGCCTTTCTGCAACCGTGGGCCAG
AGGGTAACAATCAATTGCCAGTCAAGCCAGTCCGTAGCGAAGAATAATAATTTGGCATGGTTCCAACAAAAACCGGG
TAAACCTCCTAAACTCCTTATCTACTCAGCTTCAACCCTTGCCGCGGGTGTGCCCAGCCGGTTCTCAGGCTCAGGTT
CCGGGACTCAATTTACACTTACCATCACTCGCGTCCAAAGTGAGGATTTTGCAACCTACTATTGTTCTGCACGGGAT
TCCGGGAACATACAGTCCTTTGGGGGTGGAACTCGGGTGGAGATAAAACGTACGGTGGCTGCCCCCTCTGTGTTCAT
CTTCCCACCCAGTGATGAGCAGCTGAAGAGTGGCACAGCCTCTGTGGTGTGCCTGCTCAACAACTTCTACCCCAGAG
AAGCCAAGGTGCAGTGGAAGGTGGACAATGCCCTGCAGAGTGGCAACAGCCAGGAGAGTGTGACAGAGCAGGACAGC
AAGGACAGCACCTACAGCCTGTCCTCCACCCTGACCCTGTCCAAGGCTGACTATGAGAAGCACAAGGTGTATGCCTG
TGAGGTGACCCACCAGGGCCTGAGCAGCCCTGTGACCAAGAGCTTCAACCGAGGAGAGTGTGGAGGAGACAAGACCC
ACACCTGCCCTCCCTGCCCAGCCCCAGAAGCTGCTGGAGGCCCCTCTGTGTTCCTCTTCCCTCCCAAGCCCAAGGAC
ACCCTGATGATCTCCAGGACCCCAGAAGTCACCTGTGTGGTGGTGGATGTGTCCCATGAAGACCCAGAAGTGAAGTT
CAACTGGTATGTGGATGGAGTGGAAGTGCACAATGCCAAGACCAAGCCCAGAGAAGAGCAGTACAACAGCACCTACC
GAGTGGTGTCTGTGCTGACTGTGCTGCACCAGGACTGGCTGAATGGGAAGGAGTACAAGTGTGCTGTGTCCAACAAG
GCCCTGCCTGCCCCCATTGAGAAGACCATCTCCAAGGCCAAGGGCCAGCCCAGAGAGCCCCAGGTCTACACCCTGCC
TCCCTCCAGAGATGAGCTGACCAAGAACCAGGTGTCCCTGTGGTGCCTGGTGAAAGGCTTCTACCCCAGTGACATTG
CTGTGGAGTGGGAGAGCAATGGCCAGCCAGAGAACAACTACAAGACCACCCCTCCTGTGCTGGACTCTGATGGCTCC
TTCTTCCTGTACAGCAAGCTGACTGTGGACAAGAGCCGCTGGCAGCAGGGCAATGTGTTCTCCTGCTCTGTCATGCA
TGAGGCCCTGCACAACCGCTTCACCCAGAAGAGCCTGAGCCTGAGCCCTGGATGA
>Sequence ID 117: SI-75X11 Chain A Amino Acid Sequence
EVQLQESGGGLVQAGDSLSLSCLVSGRSFNSYTMGWFRQAPGKEREFVAAILWSGPTTYYADSVKGRFTISRDNAKN
TVYLQMNSLKPEDTAVYYCAAALGVLVLAPGNVYSYWGQGTQVTVSSGGGGSGGGGSQVQLQESGGRLVQPGEPLSL
TCKTSGIDLSSNAIGWVRQAPGKGLEWIGVIFGSGNTYYASWAKGRFTISRSTSTVYLKMNSLRSEDTAIYYCARGG
YSSDIWGQGTLVTVSSASTKGPSVFPLAPSSKSTSGGTAALGCLVKDYFPEPVTVSWNSGALTSGVHTFPAVLQSSG
LYSLSSVVTVPSSSLGTQTYICNVNHKPSNTKVDKRVEPKSCDKTHTCPPCPAPEAAGGPSVFLFPPKPKDTLMISR
TPEVTCVVVDVSHEDPEVKFNWYVDGVEVHNAKTKPREEQYNSTYRVVSVLTVLHQDWLNGKEYKCAVSNKALPAPI
EKTISKAKGQPREPQVYTLPPSRDELTKNQVSLSCAVKGFYPSDIAVEWESNGQPENNYKTTPPVLDSDGSFFLVSK
LTVDKSRWQQGNVFSCSVMHEALHNHYTQKSLSLSPG
>Sequence ID 118: SI-75X11 Chain A Nucleotide Sequence
GAGGTGCAGCTGCAGGAGTCTGGCGGCGGCCTGGTGCAGGCTGGGGACAGCCTGAGCCTGTCCTGCCTGGTGTCTGG
CCGCTCCTTCAACTCCTACACCATGGGCTGGTTCCGCCAGGCCCCTGGGAAGGAGCGGGAGTTTGTGGCTGCCATCC
TGTGGAGTGGCCCCACCACCTACTATGCTGACTCTGTGAAGGGCCGCTTCACCATCTCCAGAGACAATGCCAAGAAC
ACTGTGTACCTGCAGATGAACAGCCTGAAGCCAGAGGACACAGCTGTGTACTACTGTGCTGCTGCCCTGGGAGTGCT
GGTGCTGGCCCCTGGCAATGTGTACAGCTACTGGGGCCAGGGCACCCAGGTGACTGTCTCGAGCGGCGGTGGAGGGT
CCGGCGGTGGTGGATCACAAGTGCAGTTGCAAGAAAGTGGTGGTAGACTGGTTCAGCCTGGTGAACCCTTGTCACTG
ACGTGTAAAACAAGCGGCATTGATCTGTCCTCTAACGCCATCGGATGGGTCCGACAGGCCCCAGGAAAAGGTCTGGA
GTGGATCGGAGTTATCTTCGGGAGCGGCAATACATACTACGCAAGCTGGGCAAAAGGGCGATTTACGATATCACGGA
GCACCTCTACAGTTTATTTGAAAATGAACTCCCTCCGGTCCGAGGATACCGCGATATATTACTGTGCCAGAGGGGGG
TACTCCTCTGATATCTGGGGGCAGGGTACACTGGTTACAGTTTCATCCGCTAGCACCAAAGGCCCCTCTGTGTTCCC
TCTGGCCCCCTCCTCCAAGAGCACCTCTGGAGGCACTGCTGCCCTGGGCTGCCTGGTGAAGGACTACTTCCCAGAGC
CTGTGACTGTGTCCTGGAACTCTGGAGCCCTGACCTCTGGAGTGCACACCTTCCCTGCTGTGCTGCAGAGCTCTGGC
CTCTACAGCCTGTCCTCTGTGGTCACTGTGCCCTCCTCCAGCCTGGGCACCCAGACCTACATCTGCAATGTGAACCA
CAAGCCCTCCAACACCAAGGTGGACAAGAGAGTGGAGCCCAAGTCCTGTGACAAGACCCACACCTGCCCTCCCTGCC
CAGCCCCAGAGGCTGCTGGAGGCCCCTCTGTGTTCCTCTTCCCTCCCAAGCCCAAGGACACCCTGATGATCTCCAGG
ACCCCAGAAGTCACCTGTGTGGTGGTGGATGTGTCCCATGAAGACCCAGAAGTGAAGTTCAACTGGTATGTGGATGG
AGTGGAGGTGCACAATGCCAAGACCAAGCCCAGAGAAGAGCAGTACAACTCCACCTACCGAGTGGTGTCTGTGCTGA
CTGTGCTGCACCAGGACTGGCTGAATGGGAAGGAGTACAAGTGTGCTGTGTCCAACAAGGCCCTGCCTGCCCCCATT
GAGAAGACCATCTCCAAGGCCAAGGGCCAGCCCAGAGAGCCCCAGGTCTACACCCTGCCTCCCTCCAGAGATGAGCT
GACCAAGAACCAGGTGTCCCTGTCCTGTGCTGTGAAAGGCTTCTACCCCAGTGACATTGCTGTGGAGTGGGAGAGCA
ATGGCCAGCCAGAGAACAACTACAAGACCACCCCTCCTGTGCTGGACTCTGATGGCTCCTTCTTCCTGGTCTCCAAG
CTGACTGTGGACAAGAGCCGCTGGCAGCAGGGCAATGTGTTCTCCTGCTCTGTCATGCATGAGGCCCTGCACAACCA
CTACACCCAGAAGAGCCTGAGCCTGAGCCCTGGATGA
>Sequence ID 119: SI-75X11 Chain B Amino Acid Sequence
DPQLTQSPSSLSATVGQRVTINCQSSQSVAKNNNLAWFQQKPGKPPKLLIYSASTLAAGVPSRFSGSGSGTQFTLTI
TRVQSEDFATYYCSARDSGNIQSFGGGTRVEIKRTVAAPSVFIFPPSDEQLKSGTASVVCLLNNFYPREAKVQWKVD
NALQSGNSQESVTEQDSKDSTYSLSSTLTLSKADYEKHKVYACEVTHQGLSSPVTKSFNRGECGGDKTHTCPPCPAP
EAAGGPSVFLFPPKPKDTLMISRTPEVTCVVVDVSHEDPEVKFNWYVDGVEVHNAKTKPREEQYNSTYRVVSVLTVL
HQDWLNGKEYKCAVSNKALPAPIEKTISKAKGQPREPQVYTLPPSRDELTKNQVSLWCLVKGFYPSDIAVEWESNGQ
PENNYKTTPPVLDSDGSFFLYSKLTVDKSRWQQGNVFSCSVMHEALHNRFTQKSLSLSPG
>Sequence ID 120: SI-75X11 Chain B Nucleotide Sequence
GATCCTCAATTGACCCAGTCCCCTAGTAGCCTTTCTGCAACCGTGGGCCAGAGGGTAACAATCAATTGCCAGTCAAG
CCAGTCCGTAGCGAAGAATAATAATTTGGCATGGTTCCAACAAAAACCGGGTAAACCTCCTAAACTCCTTATCTACT
CAGCTTCAACCCTTGCCGCGGGTGTGCCCAGCCGGTTCTCAGGCTCAGGTTCCGGGACTCAATTTACACTTACCATC
ACTCGCGTCCAAAGTGAGGATTTTGCAACCTACTATTGTTCTGCACGGGATTCCGGGAACATACAGTCCTTTGGGGG
TGGAACTCGGGTGGAGATAAAACGTACGGTGGCTGCCCCCTCTGTGTTCATCTTCCCACCCAGTGATGAGCAGCTGA
AGAGTGGCACAGCCTCTGTGGTGTGCCTGCTCAACAACTTCTACCCCAGAGAAGCCAAGGTGCAGTGGAAGGTGGAC
AATGCCCTGCAGAGTGGCAACAGCCAGGAGAGTGTGACAGAGCAGGACAGCAAGGACAGCACCTACAGCCTGTCCTC
CACCCTGACCCTGTCCAAGGCTGACTATGAGAAGCACAAGGTGTATGCCTGTGAGGTGACCCACCAGGGCCTGAGCA
GCCCTGTGACCAAGAGCTTCAACCGAGGAGAGTGTGGAGGAGACAAGACCCACACCTGCCCTCCCTGCCCAGCCCCA
GAAGCTGCTGGAGGCCCCTCTGTGTTCCTCTTCCCTCCCAAGCCCAAGGACACCCTGATGATCTCCAGGACCCCAGA
AGTCACCTGTGTGGTGGTGGATGTGTCCCATGAAGACCCAGAAGTGAAGTTCAACTGGTATGTGGATGGAGTGGAAG
TGCACAATGCCAAGACCAAGCCCAGAGAAGAGCAGTACAACAGCACCTACCGAGTGGTGTCTGTGCTGACTGTGCTG
CACCAGGACTGGCTGAATGGGAAGGAGTACAAGTGTGCTGTGTCCAACAAGGCCCTGCCTGCCCCCATTGAGAAGAC
CATCTCCAAGGCCAAGGGCCAGCCCAGAGAGCCCCAGGTCTACACCCTGCCTCCCTCCAGAGATGAGCTGACCAAGA
ACCAGGTGTCCCTGTGGTGCCTGGTGAAAGGCTTCTACCCCAGTGACATTGCTGTGGAGTGGGAGAGCAATGGCCAG
CCAGAGAACAACTACAAGACCACCCCTCCTGTGCTGGACTCTGATGGCTCCTTCTTCCTGTACAGCAAGCTGACTGT
GGACAAGAGCCGCTGGCAGCAGGGCAATGTGTTCTCCTGCTCTGTCATGCATGAGGCCCTGCACAACCGCTTCACCC
AGAAGAGCCTGAGCCTGAGCCCTGGATGA
>Sequence ID 121: SI-75X15 Chain A Amino Acid Sequence
QVQLQESGGRLVQPGEPLSLTCKTSGIDLSSNAIGWVRQAPGKGLEWIGVIFGSGNTYYASWAKGRFTISRSTSTVY
LKMNSLRSEDTAIYYCARGGYSSDIWGQGTLVTVSSASTKGPSVFPLAPSSKSTSGGTAALGCLVKDYFPEPVTVSW
NSGALTSGVHTFPAVLQSSGLYSLSSVVTVPSSSLGTQTYICNVNHKPSNTKVDKRVEPKSCDKTHTCPPCPAPEAA
GGPSVFLFPPKPKDTLMISRTPEVTCVVVDVSHEDPEVKFNWYVDGVEVHNAKTKPREEQYNSTYRVVSVLTVLHQD
WLNGKEYKCAVSNKALPAPIEKTISKAKGQPREPQVYTLPPSRDELTKNQVSLSCAVKGFYPSDIAVEWESNGQPEN
NYKTTPPVLDSDGSFFLVSKLTVDKSRWQQGNVFSCSVMHEALHNHYTQKSLSLSPG
>Sequence ID 122: SI-75X15 Chain A Nucleotide Sequence
CAAGTGCAGTTGCAAGAAAGTGGTGGTAGACTGGTTCAGCCTGGTGAACCCTTGTCACTGACGTGTAAAACAAGCGG
CATTGATCTGTCCTCTAACGCCATCGGATGGGTCCGACAGGCCCCAGGAAAAGGTCTGGAGTGGATCGGAGTTATCT
TCGGGAGCGGCAATACATACTACGCAAGCTGGGCAAAAGGGCGATTTACGATATCACGGAGCACCTCTACAGTTTAT
TTGAAAATGAACTCCCTCCGGTCCGAGGATACCGCGATATATTACTGTGCCAGAGGGGGGTACTCCTCTGATATCTG
GGGGCAGGGTACACTGGTTACAGTTTCATCCGCTAGCACCAAAGGCCCCTCTGTGTTCCCTCTGGCCCCCTCCTCCA
AGAGCACCTCTGGAGGCACTGCTGCCCTGGGCTGCCTGGTGAAGGACTACTTCCCAGAGCCTGTGACTGTGTCCTGG
AACTCTGGAGCCCTGACCTCTGGAGTGCACACCTTCCCTGCTGTGCTGCAGAGCTCTGGCCTCTACAGCCTGTCCTC
TGTGGTCACTGTGCCCTCCTCCAGCCTGGGCACCCAGACCTACATCTGCAATGTGAACCACAAGCCCTCCAACACCA
AGGTGGACAAGAGAGTGGAGCCCAAGTCCTGTGACAAGACCCACACCTGCCCTCCCTGCCCAGCCCCAGAGGCTGCT
GGAGGCCCCTCTGTGTTCCTCTTCCCTCCCAAGCCCAAGGACACCCTGATGATCTCCAGGACCCCAGAAGTCACCTG
TGTGGTGGTGGATGTGTCCCATGAAGACCCAGAAGTGAAGTTCAACTGGTATGTGGATGGAGTGGAGGTGCACAATG
CCAAGACCAAGCCCAGAGAAGAGCAGTACAACTCCACCTACCGAGTGGTGTCTGTGCTGACTGTGCTGCACCAGGAC
TGGCTGAATGGGAAGGAGTACAAGTGTGCTGTGTCCAACAAGGCCCTGCCTGCCCCCATTGAGAAGACCATCTCCAA
GGCCAAGGGCCAGCCCAGAGAGCCCCAGGTCTACACCCTGCCTCCCTCCAGAGATGAGCTGACCAAGAACCAGGTGT
CCCTGTCCTGTGCTGTGAAAGGCTTCTACCCCAGTGACATTGCTGTGGAGTGGGAGAGCAATGGCCAGCCAGAGAAC
AACTACAAGACCACCCCTCCTGTGCTGGACTCTGATGGCTCCTTCTTCCTGGTCTCCAAGCTGACTGTGGACAAGAG
CCGCTGGCAGCAGGGCAATGTGTTCTCCTGCTCTGTCATGCATGAGGCCCTGCACAACCACTACACCCAGAAGAGCC
TGAGCCTGAGCCCTGGATGA
>Sequence ID 123: SI-75X15 Chain B Amino Acid Sequence
DPQLTQSPSSLSATVGQRVTINCQSSQSVAKNNNLAWFQQKPGKPPKLLIYSASTLAAGVPSRFSGSGSGTQFTLTI
TRVQSEDFATYYCSARDSGNIQSFGGGTRVEIKRTVAAPSVFIFPPSDEQLKSGTASVVCLLNNFYPREAKVQWKVD
NALQSGNSQESVTEQDSKDSTYSLSSTLTLSKADYEKHKVYACEVTHQGLSSPVTKSFNRGECGGDKTHTCPPCPAP
EAAGGPSVFLFPPKPKDTLMISRTPEVTCVVVDVSHEDPEVKFNWYVDGVEVHNAKTKPREEQYNSTYRVVSVLTVL
HQDWLNGKEYKCAVSNKALPAPIEKTISKAKGQPREPQVYTLPPSRDELTKNQVSLWCLVKGFYPSDIAVEWESNGQ
PENNYKTTPPVLDSDGSFFLYSKLTVDKSRWQQGNVFSCSVMHEALHNRFTQKSLSLSPGGGGGSGGGGSQVQLVQS
GGGLVQAGGSLSLSCAFSGRTFSMYTMGWFRQAPGKEREFVAANRGRGLSPDIADSVNGRFTISRDNAKNTLYLQMD
SLKPEDTAVYYCAADLQYGSSWPQRSSAEYDYWGQGTTVTVSS
>Sequence ID 124: SI-75X15 Chain B Amino Acid Sequence
GATCCTCAATTGACCCAGTCCCCTAGTAGCCTTTCTGCAACCGTGGGCCAGAGGGTAACAATCAATTGCCAGTCAAG
CCAGTCCGTAGCGAAGAATAATAATTTGGCATGGTTCCAACAAAAACCGGGTAAACCTCCTAAACTCCTTATCTACT
CAGCTTCAACCCTTGCCGCGGGTGTGCCCAGCCGGTTCTCAGGCTCAGGTTCCGGGACTCAATTTACACTTACCATC
ACTCGCGTCCAAAGTGAGGATTTTGCAACCTACTATTGTTCTGCACGGGATTCCGGGAACATACAGTCCTTTGGGGG
TGGAACTCGGGTGGAGATAAAACGTACGGTGGCTGCCCCCTCTGTGTTCATCTTCCCACCCAGTGATGAGCAGCTGA
AGAGTGGCACAGCCTCTGTGGTGTGCCTGCTCAACAACTTCTACCCCAGAGAAGCCAAGGTGCAGTGGAAGGTGGAC
AATGCCCTGCAGAGTGGCAACAGCCAGGAGAGTGTGACAGAGCAGGACAGCAAGGACAGCACCTACAGCCTGTCCTC
CACCCTGACCCTGTCCAAGGCTGACTATGAGAAGCACAAGGTGTATGCCTGTGAGGTGACCCACCAGGGCCTGAGCA
GCCCTGTGACCAAGAGCTTCAACCGAGGAGAGTGTGGAGGAGACAAGACCCACACCTGCCCTCCCTGCCCAGCCCCA
GAAGCTGCTGGAGGCCCCTCTGTGTTCCTCTTCCCTCCCAAGCCCAAGGACACCCTGATGATCTCCAGGACCCCAGA
AGTCACCTGTGTGGTGGTGGATGTGTCCCATGAAGACCCAGAAGTGAAGTTCAACTGGTATGTGGATGGAGTGGAAG
TGCACAATGCCAAGACCAAGCCCAGAGAAGAGCAGTACAACAGCACCTACCGAGTGGTGTCTGTGCTGACTGTGCTG
CACCAGGACTGGCTGAATGGGAAGGAGTACAAGTGTGCTGTGTCCAACAAGGCCCTGCCTGCCCCCATTGAGAAGAC
CATCTCCAAGGCCAAGGGCCAGCCCAGAGAGCCCCAGGTCTACACCCTGCCTCCCTCCAGAGATGAGCTGACCAAGA
ACCAGGTGTCCCTGTGGTGCCTGGTGAAAGGCTTCTACCCCAGTGACATTGCTGTGGAGTGGGAGAGCAATGGCCAG
CCAGAGAACAACTACAAGACCACCCCTCCTGTGCTGGACTCTGATGGCTCCTTCTTCCTGTACAGCAAGCTGACTGT
GGACAAGAGCCGCTGGCAGCAGGGCAATGTGTTCTCCTGCTCTGTCATGCATGAGGCCCTGCACAACCGCTTCACCC
AGAAGAGCCTGAGCCTGAGCCCTGGAGGAGGAGGAGGCTCTGGAGGAGGAGGATCCCAGGTGCAGCTGGTGCAGTCT
GGCGGAGGCCTGGTGCAGGCTGGGGGCAGCCTGAGCCTGAGCTGTGCCTTCTCTGGCCGCACCTTCTCCATGTACAC
CATGGGCTGGTTCCGCCAGGCCCCAGGGAAGGAGAGAGAGTTTGTGGCTGCCAACAGAGGCAGAGGCCTGAGCCCAG
ACATTGCTGACTCTGTGAATGGCCGCTTCACCATCTCCAGAGACAATGCCAAGAACACCCTGTACCTGCAGATGGAC
AGCCTGAAGCCAGAGGACACAGCTGTGTACTACTGTGCTGCTGACCTGCAGTATGGCAGCAGCTGGCCTCAGAGGAG
CTCTGCTGAGTATGACTACTGGGGCCAGGGCACCACTGTGACTGTGTCTAGCTGA
>Sequence ID 125: SI-75X13 Chain A Amino Acid Sequence
QVQLQESGGRLVQPGEPLSLTCKTSGIDLSSNAIGWVRQAPGKGLEWIGVIFGSGNTYYASWAKGRFTISRSTSTVY
LKMNSLRSEDTAIYYCARGGYSSDIWGQGTLVTVSSASTKGPSVFPLAPSSKSTSGGTAALGCLVKDYFPEPVTVSW
NSGALTSGVHTFPAVLQSSGLYSLSSVVTVPSSSLGTQTYICNVNHKPSNTKVDKRVEPKSCDKTHTCPPCPAPEAA
GGPSVFLFPPKPKDTLMISRTPEVTCVVVDVSHEDPEVKFNWYVDGVEVHNAKTKPREEQYNSTYRVVSVLTVLHQD
WLNGKEYKCAVSNKALPAPIEKTISKAKGQPREPQVYTLPPSRDELTKNQVSLSCAVKGFYPSDIAVEWESNGQPEN
NYKTTPPVLDSDGSFFLVSKLTVDKSRWQQGNVFSCSVMHEALHNHYTQKSLSLSPGGGGGSGGGGSEVQLQESGGG
LVQAGDSLSLSCLVSGRSFNSYTMGWFRQAPGKEREFVAAILWSGPTTYYADSVKGRFTISRDNAKNTVYLQMNSLK
PEDTAVYYCAAALGVLVLAPGNVYSYWGQGTQVTVSS
>Sequence ID 126: SI-75X13 Chain A Nucleotide Sequence
CAAGTGCAGTTGCAAGAAAGTGGTGGTAGACTGGTTCAGCCTGGTGAACCCTTGTCACTGACGTGTAAAACAAGCGG
CATTGATCTGTCCTCTAACGCCATCGGATGGGTCCGACAGGCCCCAGGAAAAGGTCTGGAGTGGATCGGAGTTATCT
TCGGGAGCGGCAATACATACTACGCAAGCTGGGCAAAAGGGCGATTTACGATATCACGGAGCACCTCTACAGTTTAT
TTGAAAATGAACTCCCTCCGGTCCGAGGATACCGCGATATATTACTGTGCCAGAGGGGGGTACTCCTCTGATATCTG
GGGGCAGGGTACACTGGTTACAGTTTCATCCGCTAGCACCAAAGGCCCCTCTGTGTTCCCTCTGGCCCCCTCCTCCA
AGAGCACCTCTGGAGGCACTGCTGCCCTGGGCTGCCTGGTGAAGGACTACTTCCCAGAGCCTGTGACTGTGTCCTGG
AACTCTGGAGCCCTGACCTCTGGAGTGCACACCTTCCCTGCTGTGCTGCAGAGCTCTGGCCTCTACAGCCTGTCCTC
TGTGGTCACTGTGCCCTCCTCCAGCCTGGGCACCCAGACCTACATCTGCAATGTGAACCACAAGCCCTCCAACACCA
AGGTGGACAAGAGAGTGGAGCCCAAGTCCTGTGACAAGACCCACACCTGCCCTCCCTGCCCAGCCCCAGAGGCTGCT
GGAGGCCCCTCTGTGTTCCTCTTCCCTCCCAAGCCCAAGGACACCCTGATGATCTCCAGGACCCCAGAAGTCACCTG
TGTGGTGGTGGATGTGTCCCATGAAGACCCAGAAGTGAAGTTCAACTGGTATGTGGATGGAGTGGAGGTGCACAATG
CCAAGACCAAGCCCAGAGAAGAGCAGTACAACTCCACCTACCGAGTGGTGTCTGTGCTGACTGTGCTGCACCAGGAC
TGGCTGAATGGGAAGGAGTACAAGTGTGCTGTGTCCAACAAGGCCCTGCCTGCCCCCATTGAGAAGACCATCTCCAA
GGCCAAGGGCCAGCCCAGAGAGCCCCAGGTCTACACCCTGCCTCCCTCCAGAGATGAGCTGACCAAGAACCAGGTGT
CCCTGTCCTGTGCTGTGAAAGGCTTCTACCCCAGTGACATTGCTGTGGAGTGGGAGAGCAATGGCCAGCCAGAGAAC
AACTACAAGACCACCCCTCCTGTGCTGGACTCTGATGGCTCCTTCTTCCTGGTCTCCAAGCTGACTGTGGACAAGAG
CCGCTGGCAGCAGGGCAATGTGTTCTCCTGCTCTGTCATGCATGAGGCCCTGCACAACCACTACACCCAGAAGAGCC
TGAGCCTGAGCCCTGGAGGAGGAGGAGGCTCTGGAGGAGGAGGATCCGAGGTGCAGCTGCAGGAGTCTGGCGGCGGC
CTGGTGCAGGCTGGGGACAGCCTGAGCCTGTCCTGCCTGGTGTCTGGCCGCTCCTTCAACTCCTACACCATGGGCTG
GTTCCGCCAGGCCCCTGGGAAGGAGCGGGAGTTTGTGGCTGCCATCCTGTGGAGTGGCCCCACCACCTACTATGCTG
ACTCTGTGAAGGGCCGCTTCACCATCTCCAGAGACAATGCCAAGAACACTGTGTACCTGCAGATGAACAGCCTGAAG
CCAGAGGACACAGCTGTGTACTACTGTGCTGCTGCCCTGGGAGTGCTGGTGCTGGCCCCTGGCAATGTGTACAGCTA
CTGGGGCCAGGGCACCCAGGTGACTGTGTCTAGCTGA
>Sequence ID 127: SI-75X13 Chain B Amino Acid Sequence
DPQLTQSPSSLSATVGQRVTINCQSSQSVAKNNNLAWFQQKPGKPPKLLIYSASTLAAGVPSRFSGSGSGTQFTLTI
TRVQSEDFATYYCSARDSGNIQSFGGGTRVEIKRTVAAPSVFIFPPSDEQLKSGTASVVCLLNNFYPREAKVQWKVD
NALQSGNSQESVTEQDSKDSTYSLSSTLTLSKADYEKHKVYACEVTHQGLSSPVTKSFNRGECGGDKTHTCPPCPAP
EAAGGPSVFLFPPKPKDTLMISRTPEVTCVVVDVSHEDPEVKFNWYVDGVEVHNAKTKPREEQYNSTYRVVSVLTVL
HQDWLNGKEYKCAVSNKALPAPIEKTISKAKGQPREPQVYTLPPSRDELTKNQVSLWCLVKGFYPSDIAVEWESNGQ
PENNYKTTPPVLDSDGSFFLYSKLTVDKSRWQQGNVFSCSVMHEALHNRFTQKSLSLSPG
>Sequence ID 128: SI-75X13 Chain B Nucleotide Sequence
GATCCTCAATTGACCCAGTCCCCTAGTAGCCTTTCTGCAACCGTGGGCCAGAGGGTAACAATCAATTGCCAGTCAAG
CCAGTCCGTAGCGAAGAATAATAATTTGGCATGGTTCCAACAAAAACCGGGTAAACCTCCTAAACTCCTTATCTACT
CAGCTTCAACCCTTGCCGCGGGTGTGCCCAGCCGGTTCTCAGGCTCAGGTTCCGGGACTCAATTTACACTTACCATC
ACTCGCGTCCAAAGTGAGGATTTTGCAACCTACTATTGTTCTGCACGGGATTCCGGGAACATACAGTCCTTTGGGGG
TGGAACTCGGGTGGAGATAAAACGTACGGTGGCTGCCCCCTCTGTGTTCATCTTCCCACCCAGTGATGAGCAGCTGA
AGAGTGGCACAGCCTCTGTGGTGTGCCTGCTCAACAACTTCTACCCCAGAGAAGCCAAGGTGCAGTGGAAGGTGGAC
AATGCCCTGCAGAGTGGCAACAGCCAGGAGAGTGTGACAGAGCAGGACAGCAAGGACAGCACCTACAGCCTGTCCTC
CACCCTGACCCTGTCCAAGGCTGACTATGAGAAGCACAAGGTGTATGCCTGTGAGGTGACCCACCAGGGCCTGAGCA
GCCCTGTGACCAAGAGCTTCAACCGAGGAGAGTGTGGAGGAGACAAGACCCACACCTGCCCTCCCTGCCCAGCCCCA
GAAGCTGCTGGAGGCCCCTCTGTGTTCCTCTTCCCTCCCAAGCCCAAGGACACCCTGATGATCTCCAGGACCCCAGA
AGTCACCTGTGTGGTGGTGGATGTGTCCCATGAAGACCCAGAAGTGAAGTTCAACTGGTATGTGGATGGAGTGGAAG
TGCACAATGCCAAGACCAAGCCCAGAGAAGAGCAGTACAACAGCACCTACCGAGTGGTGTCTGTGCTGACTGTGCTG
CACCAGGACTGGCTGAATGGGAAGGAGTACAAGTGTGCTGTGTCCAACAAGGCCCTGCCTGCCCCCATTGAGAAGAC
CATCTCCAAGGCCAAGGGCCAGCCCAGAGAGCCCCAGGTCTACACCCTGCCTCCCTCCAGAGATGAGCTGACCAAGA
ACCAGGTGTCCCTGTGGTGCCTGGTGAAAGGCTTCTACCCCAGTGACATTGCTGTGGAGTGGGAGAGCAATGGCCAG
CCAGAGAACAACTACAAGACCACCCCTCCTGTGCTGGACTCTGATGGCTCCTTCTTCCTGTACAGCAAGCTGACTGT
GGACAAGAGCCGCTGGCAGCAGGGCAATGTGTTCTCCTGCTCTGTCATGCATGAGGCCCTGCACAACCGCTTCACCC
AGAAGAGCCTGAGCCTGAGCCCTGGATGA
>Sequence ID 129: SI-38P11 Chain A Amino Acid Sequence
QIVLSQSPAILSASPGEKVTMTCRASSSVSYIHWFQQKPGSSPKPWIYATSNLASGVPVRFSGSGSGTSYSLTISRV
EAEDAATYYCQQWTSNPPTFGGGTKLTVLGGGGSGGGGSGGGGSGGGGSQVQLQQPGAELVKPGASVKMSCKASGYT
FTSYNMHWVKQTPGRGLEWIGAIYPGNGDTSYNQKFKGKATLTADKSSSTAYMQLSSLTSEDSAVYYCARSTYYGGD
WYFNVWGAGTTVTVSSGGGGSGGGGSEVQLVESGGGLVQPGGSLRLSCAASGFTISTNAMSWVRQAPGKGLEWIGVI
TGRDITYYASWAKGRFTISRDNSKNTLYLQMNSLRAEDTAVYYCARDGGSSAITSNNIWGQGTLVTVSSASTKGPSV
FPLAPSSKSTSGGTAALGCLVKDYFPEPVTVSWNSGALTSGVHTFPAVLQSSGLYSLSSVVTVPSSSLGTQTYICNV
NHKPSNTKVDKRVEPKSCDKTHTCPPCPAPEAAGGPSVFLFPPKPKDTLMISRTPEVTCVVVDVSHEDPEVKFNWYV
DGVEVHNAKTKPREEQYNSTYRVVSVLTVLHQDWLNGKEYKCAVSNKALPAPIEKTISKAKGQPREPQVYTLPPSRD
ELTKNQVSLSCAVKGFYPSDIAVEWESNGQPENNYKTTPPVLDSDGSFFLVSKLTVDKSRWQQGNVFSCSVMHEALH
NHYTQKSLSLSPGGGGGSGGGGSDVVMTQSPSSVSASVGDRVTITCQASQNIRTYLSWYQQKPGKAPKLLIYAAANL
ASGVPSRFSGSGSGTDFTLTISDLEPGDAATYYCQSTYLGTDYVGGAFGGGTKLTVLGGGGSGGGGSGGGGSGGGGS
EVQLVESGGGLVQPGGSLRLSCTASGFTISSYHMQWVRQAPGKGLEYIGTISSGGNVYYASSARGRFTISRPSSKNT
VDLQMNSLRAEDTAVYYCARDSGYSDPMWGQGTLVTVSS
>Sequence ID 130: SI-38P11 Chain A Nucleotide Sequence
CAGATCGTGCTGAGCCAGAGCCCCGCCATCCTGAGCGCCAGCCCCGGCGAGAAGGTGACCATGACCTGCCGGGCCAG
CAGCAGCGTGAGCTACATCCACTGGTTCCAGCAGAAGCCCGGCAGCAGCCCCAAGCCCTGGATCTACGCCACCAGCA
ACCTGGCCAGCGGCGTGCCCGTGCGGTTCAGCGGCAGCGGCAGCGGCACCAGCTACAGCCTGACCATCAGCCGGGTG
GAGGCCGAGGACGCCGCCACCTACTACTGCCAGCAGTGGACCAGCAACCCCCCCACCTTCGGCGGCGGCACCAAGCT
GACCGTGCTGGGCGGTGGCGGTAGTGGGGGAGGCGGTTCTGGCGGCGGAGGGTCCGGCGGTGGAGGATCACAGGTGC
AGCTGCAGCAGCCCGGCGCCGAGCTGGTGAAGCCCGGCGCCAGCGTGAAGATGAGCTGCAAGGCCAGCGGCTACACC
TTCACCAGCTACAACATGCACTGGGTGAAGCAGACCCCCGGCCGGGGCCTGGAGTGGATCGGCGCCATCTACCCCGG
CAACGGCGACACCAGCTACAACCAGAAGTTCAAGGGCAAGGCCACCCTGACCGCCGACAAGAGCAGCAGCACCGCCT
ACATGCAGCTGAGCAGCCTGACCAGCGAGGACAGCGCCGTGTACTACTGCGCCCGGAGCACCTACTACGGCGGCGAC
TGGTACTTCAACGTGTGGGGCGCCGGCACCACCGTGACCGTCTCGAGCGGCGGTGGAGGGTCCGGCGGTGGTGGATC
AGAGGTGCAGCTGGTGGAGTCTGGGGGAGGCTTGGTCCAGCCTGGGGGGTCCCTGAGACTCTCCTGTGCAGCCTCTG
GATTCACCATCAGTACCAATGCAATGAGCTGGGTCCGCCAGGCTCCAGGGAAGGGGCTGGAGTGGATCGGAGTCATT
ACTGGTCGTGATATCACATACTACGCGAGCTGGGCGAAAGGCAGATTCACCATCTCCAGAGACAATTCCAAGAACAC
GCTGTATCTTCAAATGAACAGCCTGAGAGCCGAGGACACGGCTGTGTATTACTGTGCGAGAGACGGTGGTTCTTCTG
CTATTACTAGTAACAACATTTGGGGCCAGGGAACCCTGGTCACCGTGTCCTCAGCTAGCACCAAGGGCCCATCGGTC
TTCCCCCTGGCACCCTCCTCCAAGAGCACCTCTGGGGGCACAGCGGCCCTGGGCTGCCTGGTCAAGGACTACTTCCC
CGAACCGGTGACGGTGTCGTGGAACTCAGGCGCCCTGACCAGCGGCGTGCACACCTTCCCGGCTGTCCTACAGTCCT
CAGGACTCTACTCCCTCAGCAGCGTGGTGACCGTGCCCTCCAGCAGCTTGGGCACCCAGACCTACATCTGCAACGTG
AATCACAAGCCCAGCAACACCAAGGTGGACAAGAGAGTTGAGCCCAAATCTTGTGACAAAACTCACACATGCCCACC
GTGCCCAGCACCTGAAGCCGCGGGGGGACCGTCAGTCTTCCTCTTCCCCCCAAAACCCAAGGACACCCTCATGATCT
CCCGGACCCCTGAGGTCACATGCGTGGTGGTGGACGTGAGCCACGAAGACCCTGAGGTCAAGTTCAACTGGTACGTG
GACGGCGTGGAGGTGCATAATGCCAAGACAAAGCCGCGGGAGGAGCAGTACAACAGCACGTACCGTGTGGTCAGCGT
CCTCACCGTCCTGCACCAGGACTGGCTGAATGGCAAGGAGTACAAGTGCGCGGTCTCCAACAAAGCCCTCCCAGCCC
CCATCGAGAAAACCATCTCCAAAGCCAAAGGGCAGCCCCGAGAACCACAGGTGTATACCCTGCCCCCATCCCGGGAT
GAGCTGACCAAGAACCAGGTCAGCCTGTCCTGCGCCGTCAAAGGCTTCTATCCCAGCGACATCGCCGTGGAGTGGGA
GAGCAATGGGCAGCCGGAGAACAACTACAAGACCACGCCTCCCGTGCTGGACTCCGACGGCTCCTTCTTCCTCGTGA
GCAAGCTCACCGTGGACAAGAGCAGGTGGCAGCAGGGGAACGTCTTCTCATGCTCCGTGATGCATGAGGCTCTGCAC
AACCACTACACGCAGAAGAGCCTCTCCCTGTCTCCGGGTGGCGGCGGCGGTTCAGGTGGTGGGGGATCCGACGTTGT
GATGACGCAGTCTCCTAGTTCAGTATCAGCGTCTGTTGGGGATCGAGTCACGATTACATGCCAGGCGAGCCAAAATA
TTAGGACGTATCTGTCTTGGTATCAACAAAAGCCTGGTAAGGCTCCAAAACTCCTCATTTACGCCGCTGCCAACTTG
GCTAGTGGAGTACCTTCACGCTTTAGTGGGTCAGGTTCTGGAACAGATTTTACGTTGACGATCTCCGATTTGGAACC
AGGGGACGCTGCCACGTATTATTGCCAGTCCACCTACCTCGGGACTGACTACGTTGGTGGGGCGTTTGGCGGAGGAA
CAAAACTCACTGTACTTGGTGGTGGTGGTTCAGGCGGGGGGGGTTCCGGCGGAGGCGGTTCTGGGGGTGGAGGTTCC
GAGGTTCAGTTGGTTGAAAGTGGGGGGGGACTCGTTCAGCCTGGAGGCTCTTTGCGACTTTCTTGTACCGCTTCTGG
GTTCACTATAAGTTCATATCATATGCAATGGGTAAGACAGGCGCCTGGTAAGGGACTTGAATACATAGGAACAATAA
GCTCTGGTGGTAACGTCTATTACGCCTCATCCGCGCGGGGGAGGTTTACAATTTCCAGGCCTTCTAGCAAAAACACG
GTAGATCTGCAAATGAACTCTCTTCGCGCTGAAGATACAGCAGTCTACTACTGCGCCAGGGATTCAGGGTATTCTGA
CCCCATGTGGGGGCAGGGCACATTGGTTACCGTGTCCTCTTGA
>Sequence ID 131: SI-38P11 Chain B Amino Acid Sequence
ENVLTQSPASLSASPGERVTITCSASSSVSYMHWYQQKPGQAPKLWIYDTSKLASGVPSRFSGSGSGNDHTLTISSM
EPEDFATYYCFQGSVYPFTFGQGTKVTVLGGGGSGGGGSGGGGSGGGGSQVTLKESGPGLVQPGQTLSLTCAFSGFS
LSTSGMGVGWIRQPPGKGLEWLAHIWWDDDKRYNPALKSRLTISKDTSKNQVYLQMNSLDAEDTAVYYCARMELWSY
YFDYWGQGTLVTVSSGGGGSGGGGSDVVMTQSPSTLSASVGDRVTINCQASESISSWLAWYQQKPGKAPKLLIYEAS
KLASGVPSRFSGSGSGTEFTLTISSLQPDDFATYYCQGYFYFISRTYVNSFGGGTKVEIKRTVAAPSVFIFPPSDEQ
LKSGTASVVCLLNNFYPREAKVQWKVDNALQSGNSQESVTEQDSKDSTYSLSSTLTLSKADYEKHKVYACEVTHQGL
SSPVTKSFNRGECGGDKTHTCPPCPAPEAAGGPSVFLFPPKPKDTLMISRTPEVTCVVVDVSHEDPEVKFNWYVDGV
EVHNAKTKPREEQYNSTYRVVSVLTVLHQDWLNGKEYKCAVSNKALPAPIEKTISKAKGQPREPQVYTLPPSRDELT
KNQVSLWCLVKGFYPSDIAVEWESNGQPENNYKTTPPVLDSDGSFFLYSKLTVDKSRWQQGNVFSCSVMHEALHNRF
TQKSLSLSPGGGGGSGGGGSDIQMTQSPSTLSASVGDRVTITCQASQSISSHLNWYQQKPGKAPKLLIYKASTLASG
VPSRFSGSGSGTEFTLTISSLQPDDFATYYCQQGYSWGNVDNVFGGGTKVTVLGGGGSGGGGSGGGGSGGGGSEVQL
LESGGGLVQPGGSLSLSCAASGFSFSSGYDMCWVRQAPGKGLEWIACIAAGSAGITYDANWAKGRFTISRDNSKNTL
YLQMNSLRAEDTAVYYCARSAFSFDYAMDLWGQGTLVTVSS
>Sequence ID 132: SI-38P11 Chain B Nucleotide Sequence
GAAAATGTATTGACACAGAGCCCCGCCTCCCTCAGTGCCTCACCTGGGGAAAGGGTAACTATCACTTGCTCTGCATC
AAGCAGCGTCTCATACATGCATTGGTATCAACAAAAGCCTGGACAGGCCCCCAAGCTCTGGATATACGATACGAGCA
AGCTGGCTTCCGGCGTACCTAGCCGCTTCAGTGGTTCCGGCTCAGGCAACGATCACACCCTTACGATTTCCAGTATG
GAACCCGAAGATTTTGCAACTTATTATTGTTTCCAGGGGAGCGTGTACCCATTCACTTTCGGGCAGGGGACAAAAGT
GACCGTCCTAGGCGGTGGCGGTAGTGGGGGAGGCGGTTCTGGCGGCGGAGGGTCCGGCGGTGGAGGATCACAGGTCA
CATTGAAGGAATCTGGCCCCGGCCTTGTTCAGCCAGGACAGACCCTTAGCCTCACCTGTGCCTTCAGTGGTTTTTCT
CTTAGCACTAGCGGTATGGGGGTCGGCTGGATTCGGCAGCCTCCCGGCAAAGGTCTTGAGTGGTTGGCTCACATTTG
GTGGGACGACGACAAACGGTATAATCCTGCCTTGAAAAGTCGGCTGACCATTAGTAAGGATACCTCAAAAAATCAAG
TGTACTTGCAAATGAATAGCCTTGACGCCGAGGATACGGCTGTATATTATTGCGCGCGGATGGAACTCTGGTCTTAC
TACTTTGATTATTGGGGGCAGGGGACTCTCGTCACGGTCTCGAGCGGCGGTGGAGGGTCCGGCGGTGGTGGATCAGA
CGTCGTGATGACCCAGTCTCCTTCCACCCTGTCTGCATCTGTAGGAGACAGAGTCACCATCAATTGCCAAGCCAGTG
AGAGCATTAGCAGTTGGTTAGCCTGGTATCAGCAGAAACCAGGGAAAGCCCCTAAGCTCCTGATCTATGAAGCATCC
AAACTGGCATCTGGGGTCCCATCAAGGTTCAGCGGCAGTGGATCTGGGACAGAATTCACTCTCACCATCAGCAGCCT
GCAGCCTGATGATTTTGCAACTTATTACTGCCAAGGCTATTTTTATTTTATTAGTCGTACTTATGTAAATTCTTTCG
GCGGAGGGACCAAGGTGGAGATCAAACGTACGGTGGCTGCACCATCTGTCTTCATCTTCCCGCCATCTGATGAGCAG
TTGAAATCTGGAACTGCCTCTGTTGTGTGCCTGCTGAATAACTTCTATCCCAGAGAGGCCAAAGTACAGTGGAAGGT
GGATAACGCCCTCCAATCGGGTAACTCCCAGGAGAGTGTCACAGAGCAGGACAGCAAGGACAGCACCTACAGCCTCA
GCAGCACCCTGACGCTGAGCAAAGCAGACTACGAGAAACACAAAGTCTACGCCTGCGAAGTCACCCATCAGGGCCTG
AGCTCGCCCGTCACAAAGAGCTTCAACAGGGGAGAGTGTGGAGGCGACAAAACTCACACATGCCCACCGTGCCCAGC
ACCTGAAGCCGCGGGGGGACCGTCAGTCTTCCTCTTCCCCCCAAAACCCAAGGACACCCTCATGATCTCCCGGACCC
CTGAGGTCACATGCGTGGTGGTGGACGTGAGCCACGAAGACCCTGAGGTCAAGTTCAACTGGTACGTGGACGGCGTG
GAGGTGCATAATGCCAAGACAAAGCCGCGGGAGGAGCAGTACAACAGCACGTACCGTGTGGTCAGCGTCCTCACCGT
CCTGCACCAGGACTGGCTGAATGGCAAGGAGTACAAGTGCGCGGTCTCCAACAAAGCCCTCCCAGCCCCCATCGAGA
AAACCATCTCCAAAGCCAAAGGGCAGCCCCGAGAACCACAGGTGTACACCCTGCCCCCAAGCCGGGATGAGCTGACC
AAGAACCAGGTCAGCCTGTGGTGCCTGGTCAAAGGCTTCTATCCCAGCGACATCGCCGTGGAGTGGGAGAGCAATGG
GCAGCCGGAGAACAACTACAAGACCACGCCTCCCGTGCTGGACTCCGACGGCTCCTTCTTCCTCTATAGCAAGCTCA
CCGTGGACAAGAGCAGGTGGCAGCAGGGGAACGTCTTCTCATGCTCCGTGATGCATGAGGCTCTGCACAACAGATTC
ACGCAGAAGAGCCTCTCCCTGTCTCCGGGTGGCGGTGGAGGGTCCGGCGGTGGTGGATCCGACATTCAGATGACACA
GTCACCGTCTACGCTCTCAGCCTCAGTAGGCGATAGGGTGACTATCACCTGCCAAGCCTCCCAATCTATAAGTTCAC
ACCTCAACTGGTATCAACAGAAACCCGGTAAAGCACCGAAGCTGCTCATCTACAAGGCATCAACTCTTGCCTCAGGT
GTGCCTAGTCGCTTCTCCGGGAGCGGCTCCGGTACTGAGTTTACTTTGACGATATCTTCCCTCCAACCCGACGACTT
CGCCACATACTATTGTCAGCAGGGTTATAGTTGGGGAAATGTTGACAATGTGTTTGGAGGGGGAACGAAAGTGACTG
TGTTGGGAGGGGGAGGAAGTGGCGGCGGCGGAAGCGGAGGTGGTGGCTCCGGCGGGGGTGGAAGCGAAGTGCAATTG
CTCGAAAGTGGTGGCGGACTTGTGCAACCTGGTGGAAGCCTCTCACTCTCTTGCGCGGCGAGTGGTTTTAGCTTCAG
TAGCGGCTACGATATGTGCTGGGTAAGACAGGCTCCTGGTAAAGGCCTTGAGTGGATTGCGTGTATCGCCGCCGGGT
CTGCTGGTATAACATACGATGCAAACTGGGCGAAAGGGCGCTTCACAATCTCCAGGGACAACTCAAAAAATACATTG
TACCTCCAGATGAATAGCCTGAGAGCCGAAGACACCGCAGTCTACTATTGCGCAAGGTCAGCATTTAGCTTCGATTA
TGCAATGGATCTTTGGGGCCAGGGGACGCTCGTCACCGTCTCATCTTGA
>Sequence ID 133: SI-76PM1 Chain A Amino Acid Sequence
QIVLSQSPAILSASPGEKVTMTCRASSSVSYIHWFQQKPGSSPKPWIYATSNLASGVPVRFSGSGSGTSYSLTISRV
EAEDAATYYCQQWTSNPPTFGGGTKLTVLGGGGSGGGGSGGGGSGGGGSQVQLQQPGAELVKPGASVKMSCKASGYT
FTSYNMHWVKQTPGRGLEWIGAIYPGNGDTSYNQKFKGKATLTADKSSSTAYMQLSSLTSEDSAVYYCARSTYYGGD
WYFNVWGAGTTVTVSSGGGGSGGGGSEVQLVESGGGLVQPGGSLRLSCAASGFTISTNAMSWVRQAPGKCLEWIGVI
TGRDITYYASWAKGRFTISRDNSKNTLYLQMNSLRAEDTAVYYCARDGGSSAITSNNIWGQGTLVTVSSASTKGPSV
FPLAPSSKSTSGGTAALGCLVKDYFPEPVTVSWNSGALTSGVHTFPAVLQSSGLYSLSSVVTVPSSSLGTQTYICNV
NHKPSNTKVDKRVEPKSCDKTHTCPPCPAPEAAGGPSVFLFPPKPKDTLMISRTPEVTCVVVDVSHEDPEVKFNWYV
DGVEVHNAKTKPREEQYNSTYRVVSVLTVLHQDWLNGKEYKCAVSNKALPAPIEKTISKAKGQPREPQVYTLPPSRD
ELTKNQVSLSCAVKGFYPSDIAVEWESNGQPENNYKTTPPVLDSDGSFFLVSKLTVDKSRWQQGNVFSCSVMHEALH
NHYTQKSLSLSPGGGGGSGGGGSDVVMTQSPSSVSASVGDRVTITCQASQNIRTYLSWYQQKPGKAPKLLIYAAANL
ASGVPSRFSGSGSGTDFTLTISDLEPGDAATYYCQSTYLGTDYVGGAFGGGTKLTVLGGGGSGGGGSGGGGSGGGGS
EVQLVESGGGLVQPGGSLRLSCTASGFTISSYHMQWVRQAPGKGLEYIGTISSGGNVYYASSARGRFTISRPSSKNT
VDLQMNSLRAEDTAVYYCARDSGYSDPMWGQGTLVTVSS
>Sequence ID 134: SI-76PM1 Chain A Nucleotide Sequence
CAGATCGTGCTGAGCCAGAGCCCCGCCATCCTGAGCGCCAGCCCCGGCGAGAAGGTGACCATGACCTGCCGGGCCAG
CAGCAGCGTGAGCTACATCCACTGGTTCCAGCAGAAGCCCGGCAGCAGCCCCAAGCCCTGGATCTACGCCACCAGCA
ACCTGGCCAGCGGCGTGCCCGTGCGGTTCAGCGGCAGCGGCAGCGGCACCAGCTACAGCCTGACCATCAGCCGGGTG
GAGGCCGAGGACGCCGCCACCTACTACTGCCAGCAGTGGACCAGCAACCCCCCCACCTTCGGCGGCGGCACCAAGCT
GACCGTGCTGGGCGGTGGCGGTAGTGGGGGAGGCGGTTCTGGCGGCGGAGGGTCCGGCGGTGGAGGATCACAGGTGC
AGCTGCAGCAGCCCGGCGCCGAGCTGGTGAAGCCCGGCGCCAGCGTGAAGATGAGCTGCAAGGCCAGCGGCTACACC
TTCACCAGCTACAACATGCACTGGGTGAAGCAGACCCCCGGCCGGGGCCTGGAGTGGATCGGCGCCATCTACCCCGG
CAACGGCGACACCAGCTACAACCAGAAGTTCAAGGGCAAGGCCACCCTGACCGCCGACAAGAGCAGCAGCACCGCCT
ACATGCAGCTGAGCAGCCTGACCAGCGAGGACAGCGCCGTGTACTACTGCGCCCGGAGCACCTACTACGGCGGCGAC
TGGTACTTCAACGTGTGGGGCGCCGGCACCACCGTGACCGTCTCGAGCGGCGGTGGAGGGTCCGGCGGTGGTGGATC
AGAGGTGCAGCTGGTGGAGTCTGGGGGAGGCTTGGTCCAGCCTGGGGGGTCCCTGAGACTCTCCTGTGCAGCCTCTG
GATTCACCATCAGTACCAATGCAATGAGCTGGGTCCGCCAGGCTCCAGGGAAGTGTCTGGAGTGGATCGGAGTCATT
ACTGGTCGTGATATCACATACTACGCGAGCTGGGCGAAAGGCAGATTCACCATCTCCAGAGACAATTCCAAGAACAC
GCTGTATCTTCAAATGAACAGCCTGAGAGCCGAGGACACGGCTGTGTATTACTGTGCGAGAGACGGTGGTTCTTCTG
CTATTACTAGTAACAACATTTGGGGCCAGGGAACCCTGGTCACCGTGTCCTCAGCTAGCACCAAGGGCCCATCGGTC
TTCCCCCTGGCACCCTCCTCCAAGAGCACCTCTGGGGGCACAGCGGCCCTGGGCTGCCTGGTCAAGGACTACTTCCC
CGAACCGGTGACGGTGTCGTGGAACTCAGGCGCCCTGACCAGCGGCGTGCACACCTTCCCGGCTGTCCTACAGTCCT
CAGGACTCTACTCCCTCAGCAGCGTGGTGACCGTGCCCTCCAGCAGCTTGGGCACCCAGACCTACATCTGCAACGTG
AATCACAAGCCCAGCAACACCAAGGTGGACAAGAGAGTTGAGCCCAAATCTTGTGACAAAACTCACACATGCCCACC
GTGCCCAGCACCTGAAGCCGCGGGGGGACCGTCAGTCTTCCTCTTCCCCCCAAAACCCAAGGACACCCTCATGATCT
CCCGGACCCCTGAGGTCACATGCGTGGTGGTGGACGTGAGCCACGAAGACCCTGAGGTCAAGTTCAACTGGTACGTG
GACGGCGTGGAGGTGCATAATGCCAAGACAAAGCCGCGGGAGGAGCAGTACAACAGCACGTACCGTGTGGTCAGCGT
CCTCACCGTCCTGCACCAGGACTGGCTGAATGGCAAGGAGTACAAGTGCGCGGTCTCCAACAAAGCCCTCCCAGCCC
CCATCGAGAAAACCATCTCCAAAGCCAAAGGGCAGCCCCGAGAACCACAGGTGTATACCCTGCCCCCATCCCGGGAT
GAGCTGACCAAGAACCAGGTCAGCCTGTCCTGCGCCGTCAAAGGCTTCTATCCCAGCGACATCGCCGTGGAGTGGGA
GAGCAATGGGCAGCCGGAGAACAACTACAAGACCACGCCTCCCGTGCTGGACTCCGACGGCTCCTTCTTCCTCGTGA
GCAAGCTCACCGTGGACAAGAGCAGGTGGCAGCAGGGGAACGTCTTCTCATGCTCCGTGATGCATGAGGCTCTGCAC
AACCACTACACGCAGAAGAGCCTCTCCCTGTCTCCGGGTGGCGGCGGCGGTTCAGGTGGTGGGGGATCCGACGTTGT
GATGACGCAGTCTCCTAGTTCAGTATCAGCGTCTGTTGGGGATCGAGTCACGATTACATGCCAGGCGAGCCAAAATA
TTAGGACGTATCTGTCTTGGTATCAACAAAAGCCTGGTAAGGCTCCAAAACTCCTCATTTACGCCGCTGCCAACTTG
GCTAGTGGAGTACCTTCACGCTTTAGTGGGTCAGGTTCTGGAACAGATTTTACGTTGACGATCTCCGATTTGGAACC
AGGGGACGCTGCCACGTATTATTGCCAGTCCACCTACCTCGGGACTGACTACGTTGGTGGGGCGTTTGGCGGAGGAA
CAAAACTCACTGTACTTGGTGGTGGTGGTTCAGGCGGGGGGGGTTCCGGCGGAGGCGGTTCTGGGGGTGGAGGTTCC
GAGGTTCAGTTGGTTGAAAGTGGGGGGGGACTCGTTCAGCCTGGAGGCTCTTTGCGACTTTCTTGTACCGCTTCTGG
GTTCACTATAAGTTCATATCATATGCAATGGGTAAGACAGGCGCCTGGTAAGGGACTTGAATACATAGGAACAATAA
GCTCTGGTGGTAACGTCTATTACGCCTCATCCGCGCGGGGGAGGTTTACAATTTCCAGGCCTTCTAGCAAAAACACG
GTAGATCTGCAAATGAACTCTCTTCGCGCTGAAGATACAGCAGTCTACTACTGCGCCAGGGATTCAGGGTATTCTGA
CCCCATGTGGGGGCAGGGCACATTGGTTACCGTGTCCTCTTGA
>Sequence ID 135: SI-76PM1 Chain B Amino Acid Sequence
ENVLTQSPASLSASPGERVTITCSASSSVSYMHWYQQKPGQAPKLWIYDTSKLASGVPSRFSGSGSGNDHTLTISSM
EPEDFATYYCFQGSVYPFTFGQGTKVTVLGGGGSGGGGSGGGGSGGGGSQVTLKESGPGLVQPGQTLSLTCAFSGFS
LSTSGMGVGWIRQPPGKGLEWLAHIWWDDDKRYNPALKSRLTISKDTSKNQVYLQMNSLDAEDTAVYYCARMELWSY
YFDYWGQGTLVTVSSGGGGSGGGGSDVVMTQSPSTLSASVGDRVTINCQASESISSWLAWYQQKPGKAPKLLIYEAS
KLASGVPSRFSGSGSGTEFTLTISSLQPDDFATYYCQGYFYFISRTYVNSFGCGTKVEIKRTVAAPSVFIFPPSDEQ
LKSGTASVVCLLNNFYPREAKVQWKVDNALQSGNSQESVTEQDSKDSTYSLSSTLTLSKADYEKHKVYACEVTHQGL
SSPVTKSFNRGECGGDKTHTCPPCPAPEAAGGPSVFLFPPKPKDTLMISRTPEVTCVVVDVSHEDPEVKFNWYVDGV
EVHNAKTKPREEQYNSTYRVVSVLTVLHQDWLNGKEYKCAVSNKALPAPIEKTISKAKGQPREPQVYTLPPSRDELT
KNQVSLWCLVKGFYPSDIAVEWESNGQPENNYKTTPPVLDSDGSFFLYSKLTVDKSRWQQGNVFSCSVMHEALHNRF
TQKSLSLSPGGGGGSGGGGSDIQMTQSPSTLSASVGDRVTITCQASQSISSHLNWYQQKPGKAPKLLIYKASTLASG
VPSRFSGSGSGTEFTLTISSLQPDDFATYYCQQGYSWGNVDNVFGGGTKVTVLGGGGSGGGGSGGGGSGGGGSEVQL
LESGGGLVQPGGSLSLSCAASGFSFSSGYDMCWVRQAPGKGLEWIACIAAGSAGITYDANWAKGRETISRDNSKNTL
YLQMNSLRAEDTAVYYCARSAFSFDYAMDLWGQGTLVTVSS
>Sequence ID 136: SI-76PM1 Chain B Nucleotide Sequence
GAAAATGTATTGACACAGAGCCCCGCCTCCCTCAGTGCCTCACCTGGGGAAAGGGTAACTATCACTTGCTCTGCATC
AAGCAGCGTCTCATACATGCATTGGTATCAACAAAAGCCTGGACAGGCCCCCAAGCTCTGGATATACGATACGAGCA
AGCTGGCTTCCGGCGTACCTAGCCGCTTCAGTGGTTCCGGCTCAGGCAACGATCACACCCTTACGATTTCCAGTATG
GAACCCGAAGATTTTGCAACTTATTATTGTTTCCAGGGGAGCGTGTACCCATTCACTTTCGGGCAGGGGACAAAAGT
GACCGTCCTAGGCGGTGGCGGTAGTGGGGGAGGCGGTTCTGGCGGCGGAGGGTCCGGCGGTGGAGGATCACAGGTCA
CATTGAAGGAATCTGGCCCCGGCCTTGTTCAGCCAGGACAGACCCTTAGCCTCACCTGTGCCTTCAGTGGTTTTTCT
CTTAGCACTAGCGGTATGGGGGTCGGCTGGATTCGGCAGCCTCCCGGCAAAGGTCTTGAGTGGTTGGCTCACATTTG
GTGGGACGACGACAAACGGTATAATCCTGCCTTGAAAAGTCGGCTGACCATTAGTAAGGATACCTCAAAAAATCAAG
TGTACTTGCAAATGAATAGCCTTGACGCCGAGGATACGGCTGTATATTATTGCGCGCGGATGGAACTCTGGTCTTAC
TACTTTGATTATTGGGGGCAGGGGACTCTCGTCACGGTCTCGAGCGGCGGTGGAGGGTCCGGCGGTGGTGGATCAGA
CGTCGTGATGACCCAGTCTCCTTCCACCCTGTCTGCATCTGTAGGAGACAGAGTCACCATCAATTGCCAAGCCAGTG
AGAGCATTAGCAGTTGGTTAGCCTGGTATCAGCAGAAACCAGGGAAAGCCCCTAAGCTCCTGATCTATGAAGCATCC
AAACTGGCATCTGGGGTCCCATCAAGGTTCAGCGGCAGTGGATCTGGGACAGAATTCACTCTCACCATCAGCAGCCT
GCAGCCTGATGATTTTGCAACTTATTACTGCCAAGGCTATTTTTATTTTATTAGTCGTACTTATGTAAATTCTTTCG
GCTGTGGGACCAAGGTGGAGATCAAACGTACGGTGGCTGCACCATCTGTCTTCATCTTCCCGCCATCTGATGAGCAG
TTGAAATCTGGAACTGCCTCTGTTGTGTGCCTGCTGAATAACTTCTATCCCAGAGAGGCCAAAGTACAGTGGAAGGT
GGATAACGCCCTCCAATCGGGTAACTCCCAGGAGAGTGTCACAGAGCAGGACAGCAAGGACAGCACCTACAGCCTCA
GCAGCACCCTGACGCTGAGCAAAGCAGACTACGAGAAACACAAAGTCTACGCCTGCGAAGTCACCCATCAGGGCCTG
AGCTCGCCCGTCACAAAGAGCTTCAACAGGGGAGAGTGTGGAGGCGACAAAACTCACACATGCCCACCGTGCCCAGC
ACCTGAAGCCGCGGGGGGACCGTCAGTCTTCCTCTTCCCCCCAAAACCCAAGGACACCCTCATGATCTCCCGGACCC
CTGAGGTCACATGCGTGGTGGTGGACGTGAGCCACGAAGACCCTGAGGTCAAGTTCAACTGGTACGTGGACGGCGTG
GAGGTGCATAATGCCAAGACAAAGCCGCGGGAGGAGCAGTACAACAGCACGTACCGTGTGGTCAGCGTCCTCACCGT
CCTGCACCAGGACTGGCTGAATGGCAAGGAGTACAAGTGCGCGGTCTCCAACAAAGCCCTCCCAGCCCCCATCGAGA
AAACCATCTCCAAAGCCAAAGGGCAGCCCCGAGAACCACAGGTGTACACCCTGCCCCCAAGCCGGGATGAGCTGACC
AAGAACCAGGTCAGCCTGTGGTGCCTGGTCAAAGGCTTCTATCCCAGCGACATCGCCGTGGAGTGGGAGAGCAATGG
GCAGCCGGAGAACAACTACAAGACCACGCCTCCCGTGCTGGACTCCGACGGCTCCTTCTTCCTCTATAGCAAGCTCA
CCGTGGACAAGAGCAGGTGGCAGCAGGGGAACGTCTTCTCATGCTCCGTGATGCATGAGGCTCTGCACAACAGATTC
ACGCAGAAGAGCCTCTCCCTGTCTCCGGGTGGCGGTGGAGGGTCCGGCGGTGGTGGATCCGACATTCAGATGACACA
GTCACCGTCTACGCTCTCAGCCTCAGTAGGCGATAGGGTGACTATCACCTGCCAAGCCTCCCAATCTATAAGTTCAC
ACCTCAACTGGTATCAACAGAAACCCGGTAAAGCACCGAAGCTGCTCATCTACAAGGCATCAACTCTTGCCTCAGGT
GTGCCTAGTCGCTTCTCCGGGAGCGGCTCCGGTACTGAGTTTACTTTGACGATATCTTCCCTCCAACCCGACGACTT
CGCCACATACTATTGTCAGCAGGGTTATAGTTGGGGAAATGTTGACAATGTGTTTGGAGGGGGAACGAAAGTGACTG
TGTTGGGAGGGGGAGGAAGTGGCGGCGGCGGAAGCGGAGGTGGTGGCTCCGGCGGGGGTGGAAGCGAAGTGCAATTG
CTCGAAAGTGGTGGCGGACTTGTGCAACCTGGTGGAAGCCTCTCACTCTCTTGCGCGGCGAGTGGTTTTAGCTTCAG
TAGCGGCTACGATATGTGCTGGGTAAGACAGGCTCCTGGTAAAGGCCTTGAGTGGATTGCGTGTATCGCCGCCGGGT
CTGCTGGTATAACATACGATGCAAACTGGGCGAAAGGGCGCTTCACAATCTCCAGGGACAACTCAAAAAATACATTG
TACCTCCAGATGAATAGCCTGAGAGCCGAAGACACCGCAGTCTACTATTGCGCAAGGTCAGCATTTAGCTTCGATTA
TGCAATGGATCTTTGGGGCCAGGGGACGCTCGTCACCGTCTCATCTTGA
>Sequence ID 137: SI-68X2 Chain A Amino Acid Sequence
DIQMTQSPSSLSASVGDRVTITCQASQDISNYLNWYQQKPGKAPKLLIYDASNLETGVPSRFSGSGSGTDFTFTISS
LQPEDIATYFCQHFDHLPLAFGCGTKVEIKGGGGSGGGGSGGGGSGGGGSQVQLQESGPGLVKPSETLSLTCTVSGG
SVSSGDYYWTWIRQSPGKCLEWIGHIYYSGNTNYNPSLKSRLTISIDTSKTQFSLKLSSVTAADTAIYYCVRDRVTG
AFDIWGQGTMVTVSTGGGGSGGGGSEVQLVESGGGLVQPGGSLRLSCAASGFTISTNAMSWVRQAPGKGLEWIGVIT
GRDITYYASWAKGRFTISRDNSKNTLYLQMNSLRAEDTAVYYCARDGGSSAITSNNIWGQGTLVTVSSASTKGPSVF
PLAPSSKSTSGGTAALGCLVKDYFPEPVTVSWNSGALTSGVHTFPAVLQSSGLYSLSSVVTVPSSSLGTQTYICNVN
HKPSNTKVDKRVEPKSCDKTHTCPPCPAPEAAGGPSVFLFPPKPKDTLMISRTPEVTCVVVDVSHEDPEVKFNWYVD
GVEVHNAKTKPREEQYASTYRVVSVLTVLHQDWLNGKEYKCAVSNKALPAPIEKTISKAKGQPREPQVCTLPPSRDE
LTKNQVSLSCAVKGFYPSDIAVEWESNGQPENNYKTTPPVLDSDGSFFLVSKLTVDKSRWQQGNVFSCSVMHEALHN
HYTQKSLSLSPGK
>Sequence ID 138: SI-68X2 Chain A Nucleotide Sequence
GACATCCAGATGACCCAGTCTCCATCCTCCCTGTCTGCATCTGTAGGAGACAGAGTCACCATCACTTGCCAGGCGAG
TCAGGACATCAGCAACTATTTAAATTGGTATCAGCAGAAACCAGGGAAAGCCCCTAAACTCCTGATCTACGATGCAT
CCAATTTGGAAACAGGGGTCCCATCAAGGTTCAGTGGAAGTGGATCTGGGACAGATTTTACTTTCACCATCAGCAGC
CTGCAGCCTGAAGATATTGCAACATATTTCTGTCAACACTTTGATCATCTCCCGCTCGCTTTCGGCTGTGGGACCAA
GGTGGAAATTAAAGGCGGTGGCGGTAGTGGGGGAGGCGGTTCTGGCGGCGGAGGGTCCGGCGGTGGAGGATCACAGG
TGCAGCTGCAGGAGTCGGGCCCAGGACTGGTGAAGCCTTCGGAGACCCTGTCCCTCACCTGCACTGTCTCTGGTGGC
TCCGTCAGCAGTGGTGATTACTACTGGACCTGGATCCGGCAGTCCCCAGGGAAGTGCCTGGAGTGGATTGGACACAT
CTATTACAGTGGGAACACCAATTATAACCCCTCCCTCAAGAGCCGACTCACCATATCAATTGACACGTCCAAGACTC
AGTTCTCCCTGAAGCTGAGTTCTGTGACCGCTGCGGACACGGCCATTTATTACTGTGTGCGAGATCGAGTGACTGGT
GCTTTTGATATCTGGGGCCAAGGGACAATGGTCACCGTGTCGACAGGCGGTGGAGGGTCCGGCGGTGGTGGATCAGA
GGTGCAGCTGGTGGAGTCTGGGGGAGGCTTGGTCCAGCCTGGGGGGTCCCTGAGACTCTCCTGTGCAGCCTCTGGAT
TCACCATCAGTACCAATGCAATGAGCTGGGTCCGCCAGGCTCCAGGGAAGGGGCTGGAGTGGATCGGAGTCATTACT
GGTCGTGATATCACATACTACGCGAGCTGGGCGAAAGGCAGATTCACCATCTCCAGAGACAATTCCAAGAACACGCT
GTATCTTCAAATGAACAGCCTGAGAGCCGAGGACACGGCTGTGTATTACTGTGCGAGAGACGGTGGTTCTTCTGCTA
TTACTAGTAACAACATTTGGGGCCAGGGAACCCTGGTCACCGTGTCCTCAGCTAGCACCAAGGGCCCATCGGTCTTC
CCCCTGGCACCCTCCTCCAAGAGCACCTCTGGGGGCACAGCGGCCCTGGGCTGCCTGGTCAAGGACTACTTCCCCGA
ACCGGTGACGGTGTCGTGGAACTCAGGCGCCCTGACCAGCGGCGTGCACACCTTCCCGGCTGTCCTACAGTCCTCAG
GACTCTACTCCCTCAGCAGCGTGGTGACCGTGCCCTCCAGCAGCTTGGGCACCCAGACCTACATCTGCAACGTGAAT
CACAAGCCCAGCAACACCAAGGTGGACAAGAGAGTTGAGCCCAAATCTTGTGACAAAACTCACACATGCCCACCGTG
CCCAGCACCTGAAGCCGCGGGGGGACCGTCAGTCTTCCTCTTCCCCCCAAAACCCAAGGACACCCTCATGATCTCCC
GGACCCCTGAGGTCACATGCGTGGTGGTGGACGTGAGCCACGAAGACCCTGAGGTCAAGTTCAACTGGTACGTGGAC
GGCGTGGAGGTGCATAATGCCAAGACAAAGCCGCGGGAGGAGCAGTACGCCAGCACGTACCGTGTGGTCAGCGTCCT
CACCGTCCTGCACCAGGACTGGCTGAATGGCAAGGAGTACAAGTGCGCGGTCTCCAACAAAGCCCTCCCAGCCCCCA
TCGAGAAAACCATCTCCAAAGCCAAAGGGCAGCCCCGAGAACCACAGGTGTGTACCCTGCCCCCATCCCGGGATGAG
CTGACCAAGAACCAGGTCAGCCTGTCCTGCGCCGTCAAAGGCTTCTATCCCAGCGACATCGCCGTGGAGTGGGAGAG
CAATGGGCAGCCGGAGAACAACTACAAGACCACGCCTCCCGTGCTGGACTCCGACGGCTCCTTCTTCCTCGTGAGCA
AGCTCACCGTGGACAAGAGCAGGTGGCAGCAGGGGAACGTCTTCTCATGCTCCGTGATGCATGAGGCTCTGCACAAC
CACTACACGCAGAAGAGCCTCTCCCTGTCTCCGGGTAAATAG
>Sequence ID 139: SI-68X2 Chain B Amino Acid Sequence
QSALTQPASVSGSPGQSITISCTGTSSDVGGYNFVSWYQQHPGKAPKLMIYDVSDRPSGVSDRFSGSKSGNTASLII
SGLQADDEADYYCSSYGSSSTHVIFGCGTKVTVLGGGGSGGGGSGGGGSGGGGSQVQLQESGGGLVKPGGSLRLSCA
ASGFTFSSYWMSWVRQAPGKCLEWVANINRDGSASYYVDSVKGRFTISRDDAKNSLYLQMNSLRAEDTAVYYCARDR
GVGYFDLWGRGTLVTVSTGGGGSGGGGSDVVMTQSPSTLSASVGDRVTINCQASESISSWLAWYQQKPGKAPKLLIY
EASKLASGVPSRFSGSGSGTEFTLTISSLQPDDFATYYCQGYFYFISRTYVNSFGGGTKVEIKRTVAAPSVFIFPPS
DEQLKSGTASVVCLLNNFYPREAKVQWKVDNALQSGNSQESVTEQDSKDSTYSLSSTLTLSKADYEKHKVYACEVTH
QGLSSPVTKSFNRGECGGDKTHTCPPCPAPEAAGGPSVFLFPPKPKDTLMISRTPEVTCVVVDVSHEDPEVKFNWYV
DGVEVHNAKTKPREEQYASTYRVVSVLTVLHQDWLNGKEYKCAVSNKALPAPIEKTISKAKGQPREPQVYTLPPCRD
ELTKNQVSLWCLVKGFYPSDIAVEWESNGQPENNYKTTPPVLDSDGSFFLYSKLTVDKSRWQQGNVFSCSVMHEALH
NHYTQKSLSLSPGK
>Sequence ID 140: SI-68X2 Chain B Nucleotide Sequence
CAGTCTGCCCTGACTCAGCCTGCCTCCGTGTCTGGGTCTCCTGGACAGTCGATCACCATCTCCTGCACTGGAACCAG
CAGTGACGTTGGTGGTTATAACTTTGTCTCCTGGTACCAACAACACCCAGGCAAAGCCCCCAAACTCATGATCTATG
ATGTCAGTGATCGGCCCTCAGGGGTGTCTGATCGCTTCTCCGGCTCCAAGTCTGGCAACACGGCCTCCCTGATCATC
TCTGGCCTCCAGGCTGACGACGAGGCTGATTATTACTGCAGCTCATATGGGAGCAGCAGCACTCATGTGATTTTCGG
CTGTGGGACCAAGGTGACCGTCCTAGGCGGTGGCGGTAGTGGGGGAGGCGGTTCTGGCGGCGGAGGGTCCGGCGGTG
GAGGATCACAGGTGCAATTGCAGGAGTCGGGGGGAGGCCTGGTCAAGCCTGGAGGGTCCCTGAGACTCTCCTGTGCA
GCCTCTGGATTCACCTTTAGTAGTTATTGGATGAGCTGGGTCCGCCAGGCTCCAGGGAAGTGCCTGGAGTGGGTGGC
CAACATAAACCGCGATGGAAGTGCGAGTTACTATGTGGACTCTGTGAAGGGCCGATTCACCATCTCCAGAGACGACG
CCAAGAACTCACTGTATCTGCAAATGAACAGCCTGAGAGCTGAGGACACGGCTGTGTATTACTGTGCGAGAGATCGT
GGGGTGGGCTACTTCGATCTCTGGGGCCGTGGCACCCTGGTCACCGTGTCGACAGGCGGTGGAGGGTCCGGCGGTGG
TGGATCAGACGTCGTGATGACCCAGTCTCCTTCCACCCTGTCTGCATCTGTAGGAGACAGAGTCACCATCAATTGCC
AAGCCAGTGAGAGCATTAGCAGTTGGTTAGCCTGGTATCAGCAGAAACCAGGGAAAGCCCCTAAGCTCCTGATCTAT
GAAGCATCCAAACTGGCATCTGGGGTCCCATCAAGGTTCAGCGGCAGTGGATCTGGGACAGAATTCACTCTCACCAT
CAGCAGCCTGCAGCCTGATGATTTTGCAACTTATTACTGCCAAGGCTATTTTTATTTTATTAGTCGTACTTATGTAA
ATTCTTTCGGCGGAGGGACCAAGGTGGAGATCAAACGTACGGTGGCTGCACCATCTGTCTTCATCTTCCCGCCATCT
GATGAGCAGTTGAAATCTGGAACTGCCTCTGTTGTGTGCCTGCTGAATAACTTCTATCCCAGAGAGGCCAAAGTACA
GTGGAAGGTGGATAACGCCCTCCAATCGGGTAACTCCCAGGAGAGTGTCACAGAGCAGGACAGCAAGGACAGCACCT
ACAGCCTCAGCAGCACCCTGACGCTGAGCAAAGCAGACTACGAGAAACACAAAGTCTACGCCTGCGAAGTCACCCAT
CAGGGCCTGAGCTCGCCCGTCACAAAGAGCTTCAACAGGGGAGAGTGTGGAGGCGACAAAACTCACACATGCCCACC
GTGCCCAGCACCTGAAGCCGCGGGGGGACCGTCAGTCTTCCTCTTCCCCCCAAAACCCAAGGACACCCTCATGATCT
CCCGGACCCCTGAGGTCACATGCGTGGTGGTGGACGTGAGCCACGAAGACCCTGAGGTCAAGTTCAACTGGTACGTG
GACGGCGTGGAGGTGCATAATGCCAAGACAAAGCCGCGGGAGGAGCAGTACGCCAGCACGTACCGTGTGGTCAGCGT
CCTCACCGTCCTGCACCAGGACTGGCTGAATGGCAAGGAGTACAAGTGCGCGGTCTCCAACAAAGCCCTCCCAGCCC
CCATCGAGAAAACCATCTCCAAAGCCAAAGGGCAGCCCCGAGAACCACAGGTGTACACCCTGCCCCCATGTCGGGAT
GAGCTGACCAAGAACCAGGTCAGCCTGTGGTGCCTGGTCAAAGGCTTCTATCCCAGCGACATCGCCGTGGAGTGGGA
GAGCAATGGGCAGCCGGAGAACAACTACAAGACCACGCCTCCCGTGCTGGACTCCGACGGCTCCTTCTTCCTCTATA
GCAAGCTCACCGTGGACAAGAGCAGGTGGCAGCAGGGGAACGTCTTCTCATGCTCCGTGATGCATGAGGCTCTGCAC
AACCACTACACGCAGAAGAGCCTCTCCCTGTCTCCGGGTAAATAG
>Sequence ID 141: SI-68E1 Chain A Amino Acid Sequence
DIQMTQSPSSLSASVGDRVTITCQASQDISNYLNWYQQKPGKAPKLLIYDASNLETGVPSRFSGSGSGTDFTFTISS
LQPEDIATYFCQHFDHLPLAFGCGTKVEIKGGGGSGGGGSGGGGSGGGGSQVQLQESGPGLVKPSETLSLTCTVSGG
SVSSGDYYWTWIRQSPGKCLEWIGHIYYSGNTNYNPSLKSRLTISIDTSKTQFSLKLSSVTAADTAIYYCVRDRVTG
AFDIWGQGTMVTVSTGGGGSGGGGSEVQLVESGGGLVQPGGSLRLSCAASGFTISTNAMSWVRQAPGKGLEWIGVIT
GRDITYYASWAKGRFTISRDNSKNTLYLQMNSLRAEDTAVYYCARDGGSSAITSNNIWGQGTLVTVSSASTKGPSVF
PLAPSSKSTSGGTAALGCLVKDYFPEPVTVSWNSGALTSGVHTFPAVLQSSGLYSLSSVVTVPSSSLGTQTYICNVN
HKPSNTKVDKRVEPKSCDKTHTCPPCPAPEAAGGPSVFLFPPKPKDTLMISRTPEVTCVVVDVSHEDPEVKFNWYVD
GVEVHNAKTKPREEQYASTYRVVSVLTVLHQDWLNGKEYKCAVSNKALPAPIEKTISKAKGQPREPQVCTLPPSRDE
LTKNQVSLSCAVKGFYPSDIAVEWESNGQPENNYKTTPPVLDSDGSFFLVSKLTVDKSRWQQGNVFSCSVMHEALHN
HYTQKSLSLSPGGGGGSGGGGSRSLVESGGGLVQPGGSLRLSCTASGFTISSYHMQWVRQAPGKCLEYIGTISSGGN
VYYASSARGRFTISRPSSKNTVDLQMNSLRAEDTAVYYCARDSGYSDPMWGQGTLVTVSSGGGGSGGGGSGGGGSGG
GGSDVVMTQSPSSVSASVGDRVTITCQASQNIRTYLSWYQQKPGKAPKLLIYAAANLASGVPSRFSGSGSGTDFTLT
ISDLEPGDAATYYCQSTYLGTDYVGGAFGCGTKVEIK
>Sequence ID 142: SI-68E1 Chain A Nucleotide Sequence
GACATCCAGATGACCCAGTCTCCATCCTCCCTGTCTGCATCTGTAGGAGACAGAGTCACCATCACTTGCCAGGCGAG
TCAGGACATCAGCAACTATTTAAATTGGTATCAGCAGAAACCAGGGAAAGCCCCTAAACTCCTGATCTACGATGCAT
CCAATTTGGAAACAGGGGTCCCATCAAGGTTCAGTGGAAGTGGATCTGGGACAGATTTTACTTTCACCATCAGCAGC
CTGCAGCCTGAAGATATTGCAACATATTTCTGTCAACACTTTGATCATCTCCCGCTCGCTTTCGGCTGTGGGACCAA
GGTGGAAATTAAAGGCGGTGGCGGTAGTGGGGGAGGCGGTTCTGGCGGCGGAGGGTCCGGCGGTGGAGGATCACAGG
TGCAGCTGCAGGAGTCGGGCCCAGGACTGGTGAAGCCTTCGGAGACCCTGTCCCTCACCTGCACTGTCTCTGGTGGC
TCCGTCAGCAGTGGTGATTACTACTGGACCTGGATCCGGCAGTCCCCAGGGAAGTGCCTGGAGTGGATTGGACACAT
CTATTACAGTGGGAACACCAATTATAACCCCTCCCTCAAGAGCCGACTCACCATATCAATTGACACGTCCAAGACTC
AGTTCTCCCTGAAGCTGAGTTCTGTGACCGCTGCGGACACGGCCATTTATTACTGTGTGCGAGATCGAGTGACTGGT
GCTTTTGATATCTGGGGCCAAGGGACAATGGTCACCGTGTCGACAGGCGGTGGAGGGTCCGGCGGTGGTGGATCAGA
GGTGCAGCTGGTGGAGTCTGGGGGAGGCTTGGTCCAGCCTGGGGGGTCCCTGAGACTCTCCTGTGCAGCCTCTGGAT
TCACCATCAGTACCAATGCAATGAGCTGGGTCCGCCAGGCTCCAGGGAAGGGGCTGGAGTGGATCGGAGTCATTACT
GGTCGTGATATCACATACTACGCGAGCTGGGCGAAAGGCAGATTCACCATCTCCAGAGACAATTCCAAGAACACGCT
GTATCTTCAAATGAACAGCCTGAGAGCCGAGGACACGGCTGTGTATTACTGTGCGAGAGACGGTGGTTCTTCTGCTA
TTACTAGTAACAACATTTGGGGCCAGGGAACCCTGGTCACCGTGTCCTCAGCTAGCACCAAGGGCCCATCGGTCTTC
CCCCTGGCACCCTCCTCCAAGAGCACCTCTGGGGGCACAGCGGCCCTGGGCTGCCTGGTCAAGGACTACTTCCCCGA
ACCGGTGACGGTGTCGTGGAACTCAGGCGCCCTGACCAGCGGCGTGCACACCTTCCCGGCTGTCCTACAGTCCTCAG
GACTCTACTCCCTCAGCAGCGTGGTGACCGTGCCCTCCAGCAGCTTGGGCACCCAGACCTACATCTGCAACGTGAAT
CACAAGCCCAGCAACACCAAGGTGGACAAGAGAGTTGAGCCCAAATCTTGTGACAAAACTCACACATGCCCACCGTG
CCCAGCACCTGAAGCCGCGGGGGGACCGTCAGTCTTCCTCTTCCCCCCAAAACCCAAGGACACCCTCATGATCTCCC
GGACCCCTGAGGTCACATGCGTGGTGGTGGACGTGAGCCACGAAGACCCTGAGGTCAAGTTCAACTGGTACGTGGAC
GGCGTGGAGGTGCATAATGCCAAGACAAAGCCGCGGGAGGAGCAGTACGCCAGCACGTACCGTGTGGTCAGCGTCCT
CACCGTCCTGCACCAGGACTGGCTGAATGGCAAGGAGTACAAGTGCGCGGTCTCCAACAAAGCCCTCCCAGCCCCCA
TCGAGAAAACCATCTCCAAAGCCAAAGGGCAGCCCCGAGAACCACAGGTGTGTACCCTGCCCCCATCCCGGGATGAG
CTGACCAAGAACCAGGTCAGCCTGTCCTGCGCCGTCAAAGGCTTCTATCCCAGCGACATCGCCGTGGAGTGGGAGAG
CAATGGGCAGCCGGAGAACAACTACAAGACCACGCCTCCCGTGCTGGACTCCGACGGCTCCTTCTTCCTCGTGAGCA
AGCTCACCGTGGACAAGAGCAGGTGGCAGCAGGGGAACGTCTTCTCATGCTCCGTGATGCATGAGGCTCTGCACAAC
CACTACACGCAGAAGAGCCTCTCCCTGTCTCCGGGTGGCGGTGGAGGGTCCGGCGGTGGTGGATCCCGGTCGCTGGT
GGAGTCTGGGGGAGGCTTGGTCCAGCCTGGGGGGTCCCTGAGACTCTCCTGTACTGCCTCTGGATTCACCATCAGTA
GCTACCACATGCAGTGGGTCCGGCAGGCACCTGGGAAGTGCCTGGAGTACATCGGAACCATTAGTAGTGGTGGTAAT
GTATACTACGCAAGCTCCGCTAGAGGCAGATTCACCATCTCCAGACCCTCGTCCAAGAACACGGTGGATCTTCAAAT
GAACAGCCTGAGAGCCGAGGACACGGCTGTGTATTACTGTGCGAGAGACTCTGGTTATAGTGATCCTATGTGGGGCC
AGGGAACCCTGGTCACCGTCTCTTCAGGCGGTGGCGGTAGTGGGGGAGGCGGTTCTGGCGGCGGAGGGTCCGGCGGT
GGAGGATCAGACGTTGTGATGACCCAGTCTCCATCTTCCGTGTCTGCATCTGTAGGAGACAGAGTCACCATCACCTG
TCAGGCCAGTCAGAACATTAGGACTTACTTATCCTGGTATCAGCAGAAACCAGGGAAAGCCCCTAAGCTCCTGATCT
ATGCTGCAGCCAATCTGGCATCTGGGGTCCCATCAAGGTTCAGCGGCAGTGGATCTGGGACAGATTTCACTCTCACC
ATCAGCGACTTGGAACCTGGCGATGCTGCAACTTACTATTGTCAGTCTACCTATCTTGGTACTGATTATGTTGGCGG
TGCTTTCGGCTGTGGGACCAAGGTGGAGATCAAATGA
>Sequence ID 143: SI-68E1 Chain B Amino Acid Sequence
QSALTQPASVSGSPGQSITISCTGTSSDVGGYNFVSWYQQHPGKAPKLMIYDVSDRPSGVSDRFSGSKSGNTASLII
SGLQADDEADYYCSSYGSSSTHVIFGCGTKVTVLGGGGSGGGGSGGGGSGGGGSQVQLQESGGGLVKPGGSLRLSCA
ASGFTFSSYWMSWVRQAPGKCLEWVANINRDGSASYYVDSVKGRFTISRDDAKNSLYLQMNSLRAEDTAVYYCARDR
GVGYFDLWGRGTLVTVSTGGGGSGGGGSDVVMTQSPSTLSASVGDRVTINCQASESISSWLAWYQQKPGKAPKLLIY
EASKLASGVPSRFSGSGSGTEFTLTISSLQPDDFATYYCQGYFYFISRTYVNSFGGGTKVEIKRTVAAPSVFIFPPS
DEQLKSGTASVVCLLNNFYPREAKVQWKVDNALQSGNSQESVTEQDSKDSTYSLSSTLTLSKADYEKHKVYACEVTH
QGLSSPVTKSFNRGECGGDKTHTCPPCPAPEAAGGPSVFLFPPKPKDTLMISRTPEVTCVVVDVSHEDPEVKFNWYV
DGVEVHNAKTKPREEQYASTYRVVSVLTVLHQDWLNGKEYKCAVSNKALPAPIEKTISKAKGQPREPQVYTLPPCRD
ELTKNQVSLWCLVKGFYPSDIAVEWESNGQPENNYKTTPPVLDSDGSFFLYSKLTVDKSRWQQGNVFSCSVMHEALH
NHYTQKSLSLSPGK
>Sequence ID 144: SI-68E1 Chain B Nucleotide Sequence
CAGTCTGCCCTGACTCAGCCTGCCTCCGTGTCTGGGTCTCCTGGACAGTCGATCACCATCTCCTGCACTGGAACCAG
CAGTGACGTTGGTGGTTATAACTTTGTCTCCTGGTACCAACAACACCCAGGCAAAGCCCCCAAACTCATGATCTATG
ATGTCAGTGATCGGCCCTCAGGGGTGTCTGATCGCTTCTCCGGCTCCAAGTCTGGCAACACGGCCTCCCTGATCATC
TCTGGCCTCCAGGCTGACGACGAGGCTGATTATTACTGCAGCTCATATGGGAGCAGCAGCACTCATGTGATTTTCGG
CTGTGGGACCAAGGTGACCGTCCTAGGCGGTGGCGGTAGTGGGGGAGGCGGTTCTGGCGGCGGAGGGTCCGGCGGTG
GAGGATCACAGGTGCAATTGCAGGAGTCGGGGGGAGGCCTGGTCAAGCCTGGAGGGTCCCTGAGACTCTCCTGTGCA
GCCTCTGGATTCACCTTTAGTAGTTATTGGATGAGCTGGGTCCGCCAGGCTCCAGGGAAGTGCCTGGAGTGGGTGGC
CAACATAAACCGCGATGGAAGTGCGAGTTACTATGTGGACTCTGTGAAGGGCCGATTCACCATCTCCAGAGACGACG
CCAAGAACTCACTGTATCTGCAAATGAACAGCCTGAGAGCTGAGGACACGGCTGTGTATTACTGTGCGAGAGATCGT
GGGGTGGGCTACTTCGATCTCTGGGGCCGTGGCACCCTGGTCACCGTGTCGACAGGCGGTGGAGGGTCCGGCGGTGG
TGGATCAGACGTCGTGATGACCCAGTCTCCTTCCACCCTGTCTGCATCTGTAGGAGACAGAGTCACCATCAATTGCC
AAGCCAGTGAGAGCATTAGCAGTTGGTTAGCCTGGTATCAGCAGAAACCAGGGAAAGCCCCTAAGCTCCTGATCTAT
GAAGCATCCAAACTGGCATCTGGGGTCCCATCAAGGTTCAGCGGCAGTGGATCTGGGACAGAATTCACTCTCACCAT
CAGCAGCCTGCAGCCTGATGATTTTGCAACTTATTACTGCCAAGGCTATTTTTATTTTATTAGTCGTACTTATGTAA
ATTCTTTCGGCGGAGGGACCAAGGTGGAGATCAAACGTACGGTGGCTGCACCATCTGTCTTCATCTTCCCGCCATCT
GATGAGCAGTTGAAATCTGGAACTGCCTCTGTTGTGTGCCTGCTGAATAACTTCTATCCCAGAGAGGCCAAAGTACA
GTGGAAGGTGGATAACGCCCTCCAATCGGGTAACTCCCAGGAGAGTGTCACAGAGCAGGACAGCAAGGACAGCACCT
ACAGCCTCAGCAGCACCCTGACGCTGAGCAAAGCAGACTACGAGAAACACAAAGTCTACGCCTGCGAAGTCACCCAT
CAGGGCCTGAGCTCGCCCGTCACAAAGAGCTTCAACAGGGGAGAGTGTGGAGGCGACAAAACTCACACATGCCCACC
GTGCCCAGCACCTGAAGCCGCGGGGGGACCGTCAGTCTTCCTCTTCCCCCCAAAACCCAAGGACACCCTCATGATCT
CCCGGACCCCTGAGGTCACATGCGTGGTGGTGGACGTGAGCCACGAAGACCCTGAGGTCAAGTTCAACTGGTACGTG
GACGGCGTGGAGGTGCATAATGCCAAGACAAAGCCGCGGGAGGAGCAGTACGCCAGCACGTACCGTGTGGTCAGCGT
CCTCACCGTCCTGCACCAGGACTGGCTGAATGGCAAGGAGTACAAGTGCGCGGTCTCCAACAAAGCCCTCCCAGCCC
CCATCGAGAAAACCATCTCCAAAGCCAAAGGGCAGCCCCGAGAACCACAGGTGTACACCCTGCCCCCATGTCGGGAT
GAGCTGACCAAGAACCAGGTCAGCCTGTGGTGCCTGGTCAAAGGCTTCTATCCCAGCGACATCGCCGTGGAGTGGGA
GAGCAATGGGCAGCCGGAGAACAACTACAAGACCACGCCTCCCGTGCTGGACTCCGACGGCTCCTTCTTCCTCTATA
GCAAGCTCACCGTGGACAAGAGCAGGTGGCAGCAGGGGAACGTCTTCTCATGCTCCGTGATGCATGAGGCTCTGCAC
AACCACTACACGCAGAAGAGCCTCTCCCTGTCTCCGGGTAAATAG
>Sequence ID 145: SI-68E2 Chain A Amino Acid Sequence
DIQMTQSPSSLSASVGDRVTITCQASQDISNYLNWYQQKPGKAPKLLIYDASNLETGVPSRFSGSGSGTDFTFTISS
LQPEDIATYFCQHFDHLPLAFGCGTKVEIKGGGGSGGGGSGGGGSGGGGSQVQLQESGPGLVKPSETLSLTCTVSGG
SVSSGDYYWTWIRQSPGKCLEWIGHIYYSGNTNYNPSLKSRLTISIDTSKTQFSLKLSSVTAADTAIYYCVRDRVTG
AFDIWGQGTMVTVSTGGGGSGGGGSEVQLVESGGGLVQPGGSLRLSCAASGFTISTNAMSWVRQAPGKGLEWIGVIT
GRDITYYASWAKGRFTISRDNSKNTLYLQMNSLRAEDTAVYYCARDGGSSAITSNNIWGQGTLVTVSSASTKGPSVF
PLAPSSKSTSGGTAALGCLVKDYFPEPVTVSWNSGALTSGVHTFPAVLQSSGLYSLSSVVTVPSSSLGTQTYICNVN
HKPSNTKVDKRVEPKSCDKTHTCPPCPAPEAAGGPSVFLFPPKPKDTLMISRTPEVTCVVVDVSHEDPEVKFNWYVD
GVEVHNAKTKPREEQYASTYRVVSVLTVLHQDWLNGKEYKCAVSNKALPAPIEKTISKAKGQPREPQVCTLPPSRDE
LTKNQVSLSCAVKGFYPSDIAVEWESNGQPENNYKTTPPVLDSDGSFFLVSKLTVDKSRWQQGNVFSCSVMHEALHN
HYTQKSLSLSPGK
>Sequence ID 146: SI-68E2 Chain A Nucleotide Sequence
GACATCCAGATGACCCAGTCTCCATCCTCCCTGTCTGCATCTGTAGGAGACAGAGTCACCATCACTTGCCAGGCGAG
TCAGGACATCAGCAACTATTTAAATTGGTATCAGCAGAAACCAGGGAAAGCCCCTAAACTCCTGATCTACGATGCAT
CCAATTTGGAAACAGGGGTCCCATCAAGGTTCAGTGGAAGTGGATCTGGGACAGATTTTACTTTCACCATCAGCAGC
CTGCAGCCTGAAGATATTGCAACATATTTCTGTCAACACTTTGATCATCTCCCGCTCGCTTTCGGCTGTGGGACCAA
GGTGGAAATTAAAGGCGGTGGCGGTAGTGGGGGAGGCGGTTCTGGCGGCGGAGGGTCCGGCGGTGGAGGATCACAGG
TGCAGCTGCAGGAGTCGGGCCCAGGACTGGTGAAGCCTTCGGAGACCCTGTCCCTCACCTGCACTGTCTCTGGTGGC
TCCGTCAGCAGTGGTGATTACTACTGGACCTGGATCCGGCAGTCCCCAGGGAAGTGCCTGGAGTGGATTGGACACAT
CTATTACAGTGGGAACACCAATTATAACCCCTCCCTCAAGAGCCGACTCACCATATCAATTGACACGTCCAAGACTC
AGTTCTCCCTGAAGCTGAGTTCTGTGACCGCTGCGGACACGGCCATTTATTACTGTGTGCGAGATCGAGTGACTGGT
GCTTTTGATATCTGGGGCCAAGGGACAATGGTCACCGTGTCGACAGGCGGTGGAGGGTCCGGCGGTGGTGGATCAGA
GGTGCAGCTGGTGGAGTCTGGGGGAGGCTTGGTCCAGCCTGGGGGGTCCCTGAGACTCTCCTGTGCAGCCTCTGGAT
TCACCATCAGTACCAATGCAATGAGCTGGGTCCGCCAGGCTCCAGGGAAGGGGCTGGAGTGGATCGGAGTCATTACT
GGTCGTGATATCACATACTACGCGAGCTGGGCGAAAGGCAGATTCACCATCTCCAGAGACAATTCCAAGAACACGCT
GTATCTTCAAATGAACAGCCTGAGAGCCGAGGACACGGCTGTGTATTACTGTGCGAGAGACGGTGGTTCTTCTGCTA
TTACTAGTAACAACATTTGGGGCCAGGGAACCCTGGTCACCGTGTCCTCAGCTAGCACCAAGGGCCCATCGGTCTTC
CCCCTGGCACCCTCCTCCAAGAGCACCTCTGGGGGCACAGCGGCCCTGGGCTGCCTGGTCAAGGACTACTTCCCCGA
ACCGGTGACGGTGTCGTGGAACTCAGGCGCCCTGACCAGCGGCGTGCACACCTTCCCGGCTGTCCTACAGTCCTCAG
GACTCTACTCCCTCAGCAGCGTGGTGACCGTGCCCTCCAGCAGCTTGGGCACCCAGACCTACATCTGCAACGTGAAT
CACAAGCCCAGCAACACCAAGGTGGACAAGAGAGTTGAGCCCAAATCTTGTGACAAAACTCACACATGCCCACCGTG
CCCAGCACCTGAAGCCGCGGGGGGACCGTCAGTCTTCCTCTTCCCCCCAAAACCCAAGGACACCCTCATGATCTCCC
GGACCCCTGAGGTCACATGCGTGGTGGTGGACGTGAGCCACGAAGACCCTGAGGTCAAGTTCAACTGGTACGTGGAC
GGCGTGGAGGTGCATAATGCCAAGACAAAGCCGCGGGAGGAGCAGTACGCCAGCACGTACCGTGTGGTCAGCGTCCT
CACCGTCCTGCACCAGGACTGGCTGAATGGCAAGGAGTACAAGTGCGCGGTCTCCAACAAAGCCCTCCCAGCCCCCA
TCGAGAAAACCATCTCCAAAGCCAAAGGGCAGCCCCGAGAACCACAGGTGTGTACCCTGCCCCCATCCCGGGATGAG
CTGACCAAGAACCAGGTCAGCCTGTCCTGCGCCGTCAAAGGCTTCTATCCCAGCGACATCGCCGTGGAGTGGGAGAG
CAATGGGCAGCCGGAGAACAACTACAAGACCACGCCTCCCGTGCTGGACTCCGACGGCTCCTTCTTCCTCGTGAGCA
AGCTCACCGTGGACAAGAGCAGGTGGCAGCAGGGGAACGTCTTCTCATGCTCCGTGATGCATGAGGCTCTGCACAAC
CACTACACGCAGAAGAGCCTCTCCCTGTCTCCGGGTAAATAG
>Sequence ID 147: SI-68E2 Chain B Amino Acid Sequence
QSALTQPASVSGSPGQSITISCTGTSSDVGGYNFVSWYQQHPGKAPKLMIYDVSDRPSGVSDRFSGSKSGNTASLII
SGLQADDEADYYCSSYGSSSTHVIFGCGTKVTVLGGGGSGGGGSGGGGSGGGGSQVQLQESGGGLVKPGGSLRLSCA
ASGFTFSSYWMSWVRQAPGKCLEWVANINRDGSASYYVDSVKGRFTISRDDAKNSLYLQMNSLRAEDTAVYYCARDR
GVGYFDLWGRGTLVTVSTGGGGSGGGGSDVVMTQSPSTLSASVGDRVTINCQASESISSWLAWYQQKPGKAPKLLIY
EASKLASGVPSRFSGSGSGTEFTLTISSLQPDDFATYYCQGYFYFISRTYVNSFGGGTKVEIKRTVAAPSVFIFPPS
DEQLKSGTASVVCLLNNFYPREAKVQWKVDNALQSGNSQESVTEQDSKDSTYSLSSTLTLSKADYEKHKVYACEVTH
QGLSSPVTKSFNRGECGGDKTHTCPPCPAPEAAGGPSVFLFPPKPKDTLMISRTPEVTCVVVDVSHEDPEVKFNWYV
DGVEVHNAKTKPREEQYASTYRVVSVLTVLHQDWLNGKEYKCAVSNKALPAPIEKTISKAKGQPREPQVYTLPPCRD
ELTKNQVSLWCLVKGFYPSDIAVEWESNGQPENNYKTTPPVLDSDGSFFLYSKLTVDKSRWQQGNVFSCSVMHEALH
NHYTQKSLSLSPGGGGGSGGGGSEVQLLESGGGLVQPGGSLRLSCAASGFSFSSGYDMCWVRQAPGKCLEWIACIAA
GSAGITYDANWAKGRFTISRDNSKNTLYLQMNSLRAEDTAVYYCARSAFSFDYAMDLWGQGTLVTVSSGGGGSGGGG
SGGGGSGGGGSDIQMTQSPSTLSASVGDRVTITCQASQSISSHLNWYQQKPGKAPKLLIYKASTLASGVPSRFSGSG
SGTEFTLTISSLQPDDFATYYCQQGYSWGNVDNVFGCGTKVEIK
>Sequence ID 148: SI-68E2 Chain B Nucleotide Sequence
CAGTCTGCCCTGACTCAGCCTGCCTCCGTGTCTGGGTCTCCTGGACAGTCGATCACCATCTCCTGCACTGGAACCAG
CAGTGACGTTGGTGGTTATAACTTTGTCTCCTGGTACCAACAACACCCAGGCAAAGCCCCCAAACTCATGATCTATG
ATGTCAGTGATCGGCCCTCAGGGGTGTCTGATCGCTTCTCCGGCTCCAAGTCTGGCAACACGGCCTCCCTGATCATC
TCTGGCCTCCAGGCTGACGACGAGGCTGATTATTACTGCAGCTCATATGGGAGCAGCAGCACTCATGTGATTTTCGG
CTGTGGGACCAAGGTGACCGTCCTAGGCGGTGGCGGTAGTGGGGGAGGCGGTTCTGGCGGCGGAGGGTCCGGCGGTG
GAGGATCACAGGTGCAATTGCAGGAGTCGGGGGGAGGCCTGGTCAAGCCTGGAGGGTCCCTGAGACTCTCCTGTGCA
GCCTCTGGATTCACCTTTAGTAGTTATTGGATGAGCTGGGTCCGCCAGGCTCCAGGGAAGTGCCTGGAGTGGGTGGC
CAACATAAACCGCGATGGAAGTGCGAGTTACTATGTGGACTCTGTGAAGGGCCGATTCACCATCTCCAGAGACGACG
CCAAGAACTCACTGTATCTGCAAATGAACAGCCTGAGAGCTGAGGACACGGCTGTGTATTACTGTGCGAGAGATCGT
GGGGTGGGCTACTTCGATCTCTGGGGCCGTGGCACCCTGGTCACCGTGTCGACAGGCGGTGGAGGGTCCGGCGGTGG
TGGATCAGACGTCGTGATGACCCAGTCTCCTTCCACCCTGTCTGCATCTGTAGGAGACAGAGTCACCATCAATTGCC
AAGCCAGTGAGAGCATTAGCAGTTGGTTAGCCTGGTATCAGCAGAAACCAGGGAAAGCCCCTAAGCTCCTGATCTAT
GAAGCATCCAAACTGGCATCTGGGGTCCCATCAAGGTTCAGCGGCAGTGGATCTGGGACAGAATTCACTCTCACCAT
CAGCAGCCTGCAGCCTGATGATTTTGCAACTTATTACTGCCAAGGCTATTTTTATTTTATTAGTCGTACTTATGTAA
ATTCTTTCGGCGGAGGGACCAAGGTGGAGATCAAACGTACGGTGGCTGCACCATCTGTCTTCATCTTCCCGCCATCT
GATGAGCAGTTGAAATCTGGAACTGCCTCTGTTGTGTGCCTGCTGAATAACTTCTATCCCAGAGAGGCCAAAGTACA
GTGGAAGGTGGATAACGCCCTCCAATCGGGTAACTCCCAGGAGAGTGTCACAGAGCAGGACAGCAAGGACAGCACCT
ACAGCCTCAGCAGCACCCTGACGCTGAGCAAAGCAGACTACGAGAAACACAAAGTCTACGCCTGCGAAGTCACCCAT
CAGGGCCTGAGCTCGCCCGTCACAAAGAGCTTCAACAGGGGAGAGTGTGGAGGCGACAAAACTCACACATGCCCACC
GTGCCCAGCACCTGAAGCCGCGGGGGGACCGTCAGTCTTCCTCTTCCCCCCAAAACCCAAGGACACCCTCATGATCT
CCCGGACCCCTGAGGTCACATGCGTGGTGGTGGACGTGAGCCACGAAGACCCTGAGGTCAAGTTCAACTGGTACGTG
GACGGCGTGGAGGTGCATAATGCCAAGACAAAGCCGCGGGAGGAGCAGTACGCCAGCACGTACCGTGTGGTCAGCGT
CCTCACCGTCCTGCACCAGGACTGGCTGAATGGCAAGGAGTACAAGTGCGCGGTCTCCAACAAAGCCCTCCCAGCCC
CCATCGAGAAAACCATCTCCAAAGCCAAAGGGCAGCCCCGAGAACCACAGGTGTACACCCTGCCCCCATGTCGGGAT
GAGCTGACCAAGAACCAGGTCAGCCTGTGGTGCCTGGTCAAAGGCTTCTATCCCAGCGACATCGCCGTGGAGTGGGA
GAGCAATGGGCAGCCGGAGAACAACTACAAGACCACGCCTCCCGTGCTGGACTCCGACGGCTCCTTCTTCCTCTATA
GCAAGCTCACCGTGGACAAGAGCAGGTGGCAGCAGGGGAACGTCTTCTCATGCTCCGTGATGCATGAGGCTCTGCAC
AACCACTACACGCAGAAGAGCCTCTCCCTGTCTCCGGGTGGCGGTGGAGGGTCCGGCGGTGGTGGATCCGAGGTGCA
GCTGTTGGAGTCTGGGGGAGGCTTGGTACAGCCTGGGGGGTCCCTGAGACTCTCCTGTGCAGCCTCTGGATTCTCCT
TCAGTAGCGGGTACGACATGTGCTGGGTCCGCCAGGCTCCAGGGAAGTGCCTGGAGTGGATCGCATGCATTGCTGCT
GGTAGTGCTGGTATCACTTACGACGCGAACTGGGCGAAAGGCCGGTTCACCATCTCCAGAGACAATTCCAAGAACAC
GCTGTATCTGCAAATGAACAGCCTGAGAGCCGAGGACACGGCCGTATATTACTGTGCGAGATCGGCGTTTTCGTTCG
ACTACGCCATGGACCTCTGGGGCCAGGGAACCCTGGTCACCGTCTCGTCTGGTGGAGGCGGTTCAGGCGGAGGTGGA
AGTGGTGGTGGCGGCTCTGGAGGCGGCGGATCTGACATCCAGATGACCCAGTCTCCTTCCACCCTGTCTGCATCTGT
AGGAGACAGAGTCACCATCACTTGCCAGGCCAGTCAGAGCATTAGTTCCCACTTAAACTGGTATCAGCAGAAACCAG
GGAAAGCCCCTAAGCTCCTGATCTATAAGGCATCCACTCTGGCATCTGGGGTCCCATCAAGGTTCAGCGGCAGTGGA
TCTGGGACAGAATTTACTCTCACCATCAGCAGCCTGCAGCCTGATGATTTTGCAACTTATTACTGCCAACAGGGTTA
TAGTTGGGGTAATGTTGATAATGTTTTCGGCTGCGGGACCAAGGTGGAGATCAAATAG
>Sequence ID 149: SI-68P1 Chain A Amino Acid Sequence
DIQMTQSPSSLSASVGDRVTITCQASQDISNYLNWYQQKPGKAPKLLIYDASNLETGVPSRFSGSGSGTDFTFTISS
LQPEDIATYFCQHFDHLPLAFGCGTKVEIKGGGGSGGGGSGGGGSGGGGSQVQLQESGPGLVKPSETLSLTCTVSGG
SVSSGDYYWTWIRQSPGKCLEWIGHIYYSGNTNYNPSLKSRLTISIDTSKTQFSLKLSSVTAADTAIYYCVRDRVTG
AFDIWGQGTMVTVSTGGGGSGGGGSEVQLVESGGGLVQPGGSLRLSCAASGFTISTNAMSWVRQAPGKGLEWIGVIT
GRDITYYASWAKGRFTISRDNSKNTLYLQMNSLRAEDTAVYYCARDGGSSAITSNNIWGQGTLVTVSSASTKGPSVF
PLAPSSKSTSGGTAALGCLVKDYFPEPVTVSWNSGALTSGVHTFPAVLQSSGLYSLSSVVTVPSSSLGTQTYICNVN
HKPSNTKVDKRVEPKSCDKTHTCPPCPAPEAAGGPSVFLFPPKPKDTLMISRTPEVTCVVVDVSHEDPEVKFNWYVD
GVEVHNAKTKPREEQYASTYRVVSVLTVLHQDWLNGKEYKCAVSNKALPAPIEKTISKAKGQPREPQVCTLPPSRDE
LTKNQVSLSCAVKGFYPSDIAVEWESNGQPENNYKTTPPVLDSDGSFFLVSKLTVDKSRWQQGNVFSCSVMHEALHN
HYTQKSLSLSPGGGGGSGGGGSRSLVESGGGLVQPGGSLRLSCTASGFTISSYHMQWVRQAPGKCLEYIGTISSGGN
VYYASSARGRFTISRPSSKNTVDLQMNSLRAEDTAVYYCARDSGYSDPMWGQGTLVTVSSGGGGSGGGGSGGGGSGG
GGSDVVMTQSPSSVSASVGDRVTITCQASQNIRTYLSWYQQKPGKAPKLLIYAAANLASGVPSRFSGSGSGTDFTLT
ISDLEPGDAATYYCQSTYLGTDYVGGAFGCGTKVEIK
>Sequence ID 150: SI-68P1 Chain A Nucleotide Sequence
GACATCCAGATGACCCAGTCTCCATCCTCCCTGTCTGCATCTGTAGGAGACAGAGTCACCATCACTTGCCAGGCGAG
TCAGGACATCAGCAACTATTTAAATTGGTATCAGCAGAAACCAGGGAAAGCCCCTAAACTCCTGATCTACGATGCAT
CCAATTTGGAAACAGGGGTCCCATCAAGGTTCAGTGGAAGTGGATCTGGGACAGATTTTACTTTCACCATCAGCAGC
CTGCAGCCTGAAGATATTGCAACATATTTCTGTCAACACTTTGATCATCTCCCGCTCGCTTTCGGCTGTGGGACCAA
GGTGGAAATTAAAGGCGGTGGCGGTAGTGGGGGAGGCGGTTCTGGCGGCGGAGGGTCCGGCGGTGGAGGATCACAGG
TGCAGCTGCAGGAGTCGGGCCCAGGACTGGTGAAGCCTTCGGAGACCCTGTCCCTCACCTGCACTGTCTCTGGTGGC
TCCGTCAGCAGTGGTGATTACTACTGGACCTGGATCCGGCAGTCCCCAGGGAAGTGCCTGGAGTGGATTGGACACAT
CTATTACAGTGGGAACACCAATTATAACCCCTCCCTCAAGAGCCGACTCACCATATCAATTGACACGTCCAAGACTC
AGTTCTCCCTGAAGCTGAGTTCTGTGACCGCTGCGGACACGGCCATTTATTACTGTGTGCGAGATCGAGTGACTGGT
GCTTTTGATATCTGGGGCCAAGGGACAATGGTCACCGTGTCGACAGGCGGTGGAGGGTCCGGCGGTGGTGGATCAGA
GGTGCAGCTGGTGGAGTCTGGGGGAGGCTTGGTCCAGCCTGGGGGGTCCCTGAGACTCTCCTGTGCAGCCTCTGGAT
TCACCATCAGTACCAATGCAATGAGCTGGGTCCGCCAGGCTCCAGGGAAGGGGCTGGAGTGGATCGGAGTCATTACT
GGTCGTGATATCACATACTACGCGAGCTGGGCGAAAGGCAGATTCACCATCTCCAGAGACAATTCCAAGAACACGCT
GTATCTTCAAATGAACAGCCTGAGAGCCGAGGACACGGCTGTGTATTACTGTGCGAGAGACGGTGGTTCTTCTGCTA
TTACTAGTAACAACATTTGGGGCCAGGGAACCCTGGTCACCGTGTCCTCAGCTAGCACCAAGGGCCCATCGGTCTTC
CCCCTGGCACCCTCCTCCAAGAGCACCTCTGGGGGCACAGCGGCCCTGGGCTGCCTGGTCAAGGACTACTTCCCCGA
ACCGGTGACGGTGTCGTGGAACTCAGGCGCCCTGACCAGCGGCGTGCACACCTTCCCGGCTGTCCTACAGTCCTCAG
GACTCTACTCCCTCAGCAGCGTGGTGACCGTGCCCTCCAGCAGCTTGGGCACCCAGACCTACATCTGCAACGTGAAT
CACAAGCCCAGCAACACCAAGGTGGACAAGAGAGTTGAGCCCAAATCTTGTGACAAAACTCACACATGCCCACCGTG
CCCAGCACCTGAAGCCGCGGGGGGACCGTCAGTCTTCCTCTTCCCCCCAAAACCCAAGGACACCCTCATGATCTCCC
GGACCCCTGAGGTCACATGCGTGGTGGTGGACGTGAGCCACGAAGACCCTGAGGTCAAGTTCAACTGGTACGTGGAC
GGCGTGGAGGTGCATAATGCCAAGACAAAGCCGCGGGAGGAGCAGTACGCCAGCACGTACCGTGTGGTCAGCGTCCT
CACCGTCCTGCACCAGGACTGGCTGAATGGCAAGGAGTACAAGTGCGCGGTCTCCAACAAAGCCCTCCCAGCCCCCA
TCGAGAAAACCATCTCCAAAGCCAAAGGGCAGCCCCGAGAACCACAGGTGTGTACCCTGCCCCCATCCCGGGATGAG
CTGACCAAGAACCAGGTCAGCCTGTCCTGCGCCGTCAAAGGCTTCTATCCCAGCGACATCGCCGTGGAGTGGGAGAG
CAATGGGCAGCCGGAGAACAACTACAAGACCACGCCTCCCGTGCTGGACTCCGACGGCTCCTTCTTCCTCGTGAGCA
AGCTCACCGTGGACAAGAGCAGGTGGCAGCAGGGGAACGTCTTCTCATGCTCCGTGATGCATGAGGCTCTGCACAAC
CACTACACGCAGAAGAGCCTCTCCCTGTCTCCGGGTGGCGGTGGAGGGTCCGGCGGTGGTGGATCCCGGTCGCTGGT
GGAGTCTGGGGGAGGCTTGGTCCAGCCTGGGGGGTCCCTGAGACTCTCCTGTACTGCCTCTGGATTCACCATCAGTA
GCTACCACATGCAGTGGGTCCGGCAGGCACCTGGGAAGTGCCTGGAGTACATCGGAACCATTAGTAGTGGTGGTAAT
GTATACTACGCAAGCTCCGCTAGAGGCAGATTCACCATCTCCAGACCCTCGTCCAAGAACACGGTGGATCTTCAAAT
GAACAGCCTGAGAGCCGAGGACACGGCTGTGTATTACTGTGCGAGAGACTCTGGTTATAGTGATCCTATGTGGGGCC
AGGGAACCCTGGTCACCGTCTCTTCAGGCGGTGGCGGTAGTGGGGGAGGCGGTTCTGGCGGCGGAGGGTCCGGCGGT
GGAGGATCAGACGTTGTGATGACCCAGTCTCCATCTTCCGTGTCTGCATCTGTAGGAGACAGAGTCACCATCACCTG
TCAGGCCAGTCAGAACATTAGGACTTACTTATCCTGGTATCAGCAGAAACCAGGGAAAGCCCCTAAGCTCCTGATCT
ATGCTGCAGCCAATCTGGCATCTGGGGTCCCATCAAGGTTCAGCGGCAGTGGATCTGGGACAGATTTCACTCTCACC
ATCAGCGACTTGGAACCTGGCGATGCTGCAACTTACTATTGTCAGTCTACCTATCTTGGTACTGATTATGTTGGCGG
TGCTTTCGGCTGTGGGACCAAGGTGGAGATCAAATGA
>Sequence ID 151: SI-68P1 Chain B Amino Acid Sequence
QSALTQPASVSGSPGQSITISCTGTSSDVGGYNFVSWYQQHPGKAPKLMIYDVSDRPSGVSDRFSGSKSGNTASLII
SGLQADDEADYYCSSYGSSSTHVIFGCGTKVTVLGGGGSGGGGSGGGGSGGGGSQVQLQESGGGLVKPGGSLRLSCA
ASGFTFSSYWMSWVRQAPGKCLEWVANINRDGSASYYVDSVKGRFTISRDDAKNSLYLQMNSLRAEDTAVYYCARDR
GVGYFDLWGRGTLVTVSTGGGGSGGGGSDVVMTQSPSTLSASVGDRVTINCQASESISSWLAWYQQKPGKAPKLLIY
EASKLASGVPSRFSGSGSGTEFTLTISSLQPDDFATYYCQGYFYFISRTYVNSFGGGTKVEIKRTVAAPSVFIFPPS
DEQLKSGTASVVCLLNNFYPREAKVQWKVDNALQSGNSQESVTEQDSKDSTYSLSSTLTLSKADYEKHKVYACEVTH
QGLSSPVTKSFNRGECGGDKTHTCPPCPAPEAAGGPSVFLFPPKPKDTLMISRTPEVTCVVVDVSHEDPEVKFNWYV
DGVEVHNAKTKPREEQYASTYRVVSVLTVLHQDWLNGKEYKCAVSNKALPAPIEKTISKAKGQPREPQVYTLPPCRD
ELTKNQVSLWCLVKGFYPSDIAVEWESNGQPENNYKTTPPVLDSDGSFFLYSKLTVDKSRWQQGNVFSCSVMHEALH
NHYTQKSLSLSPGGGGGSGGGGSEVQLLESGGGLVQPGGSLRLSCAASGFSFSSGYDMCWVRQAPGKCLEWIACIAA
GSAGITYDANWAKGRFTISRDNSKNTLYLQMNSLRAEDTAVYYCARSAFSFDYAMDLWGQGTLVTVSSGGGGSGGGG
SGGGGSGGGGSDIQMTQSPSTLSASVGDRVTITCQASQSISSHLNWYQQKPGKAPKLLIYKASTLASGVPSRFSGSG
SGTEFTLTISSLQPDDFATYYCQQGYSWGNVDNVFGCGTKVEIK
>Sequence ID 152: SI-68P1 Chain B Nucleotide Sequence
CAGTCTGCCCTGACTCAGCCTGCCTCCGTGTCTGGGTCTCCTGGACAGTCGATCACCATCTCCTGCACTGGAACCAG
CAGTGACGTTGGTGGTTATAACTTTGTCTCCTGGTACCAACAACACCCAGGCAAAGCCCCCAAACTCATGATCTATG
ATGTCAGTGATCGGCCCTCAGGGGTGTCTGATCGCTTCTCCGGCTCCAAGTCTGGCAACACGGCCTCCCTGATCATC
TCTGGCCTCCAGGCTGACGACGAGGCTGATTATTACTGCAGCTCATATGGGAGCAGCAGCACTCATGTGATTTTCGG
CTGTGGGACCAAGGTGACCGTCCTAGGCGGTGGCGGTAGTGGGGGAGGCGGTTCTGGCGGCGGAGGGTCCGGCGGTG
GAGGATCACAGGTGCAATTGCAGGAGTCGGGGGGAGGCCTGGTCAAGCCTGGAGGGTCCCTGAGACTCTCCTGTGCA
GCCTCTGGATTCACCTTTAGTAGTTATTGGATGAGCTGGGTCCGCCAGGCTCCAGGGAAGTGCCTGGAGTGGGTGGC
CAACATAAACCGCGATGGAAGTGCGAGTTACTATGTGGACTCTGTGAAGGGCCGATTCACCATCTCCAGAGACGACG
CCAAGAACTCACTGTATCTGCAAATGAACAGCCTGAGAGCTGAGGACACGGCTGTGTATTACTGTGCGAGAGATCGT
GGGGTGGGCTACTTCGATCTCTGGGGCCGTGGCACCCTGGTCACCGTGTCGACAGGCGGTGGAGGGTCCGGCGGTGG
TGGATCAGACGTCGTGATGACCCAGTCTCCTTCCACCCTGTCTGCATCTGTAGGAGACAGAGTCACCATCAATTGCC
AAGCCAGTGAGAGCATTAGCAGTTGGTTAGCCTGGTATCAGCAGAAACCAGGGAAAGCCCCTAAGCTCCTGATCTAT
GAAGCATCCAAACTGGCATCTGGGGTCCCATCAAGGTTCAGCGGCAGTGGATCTGGGACAGAATTCACTCTCACCAT
CAGCAGCCTGCAGCCTGATGATTTTGCAACTTATTACTGCCAAGGCTATTTTTATTTTATTAGTCGTACTTATGTAA
ATTCTTTCGGCGGAGGGACCAAGGTGGAGATCAAACGTACGGTGGCTGCACCATCTGTCTTCATCTTCCCGCCATCT
GATGAGCAGTTGAAATCTGGAACTGCCTCTGTTGTGTGCCTGCTGAATAACTTCTATCCCAGAGAGGCCAAAGTACA
GTGGAAGGTGGATAACGCCCTCCAATCGGGTAACTCCCAGGAGAGTGTCACAGAGCAGGACAGCAAGGACAGCACCT
ACAGCCTCAGCAGCACCCTGACGCTGAGCAAAGCAGACTACGAGAAACACAAAGTCTACGCCTGCGAAGTCACCCAT
CAGGGCCTGAGCTCGCCCGTCACAAAGAGCTTCAACAGGGGAGAGTGTGGAGGCGACAAAACTCACACATGCCCACC
GTGCCCAGCACCTGAAGCCGCGGGGGGACCGTCAGTCTTCCTCTTCCCCCCAAAACCCAAGGACACCCTCATGATCT
CCCGGACCCCTGAGGTCACATGCGTGGTGGTGGACGTGAGCCACGAAGACCCTGAGGTCAAGTTCAACTGGTACGTG
GACGGCGTGGAGGTGCATAATGCCAAGACAAAGCCGCGGGAGGAGCAGTACGCCAGCACGTACCGTGTGGTCAGCGT
CCTCACCGTCCTGCACCAGGACTGGCTGAATGGCAAGGAGTACAAGTGCGCGGTCTCCAACAAAGCCCTCCCAGCCC
CCATCGAGAAAACCATCTCCAAAGCCAAAGGGCAGCCCCGAGAACCACAGGTGTACACCCTGCCCCCATGTCGGGAT
GAGCTGACCAAGAACCAGGTCAGCCTGTGGTGCCTGGTCAAAGGCTTCTATCCCAGCGACATCGCCGTGGAGTGGGA
GAGCAATGGGCAGCCGGAGAACAACTACAAGACCACGCCTCCCGTGCTGGACTCCGACGGCTCCTTCTTCCTCTATA
GCAAGCTCACCGTGGACAAGAGCAGGTGGCAGCAGGGGAACGTCTTCTCATGCTCCGTGATGCATGAGGCTCTGCAC
AACCACTACACGCAGAAGAGCCTCTCCCTGTCTCCGGGTGGCGGTGGAGGGTCCGGCGGTGGTGGATCCGAGGTGCA
GCTGTTGGAGTCTGGGGGAGGCTTGGTACAGCCTGGGGGGTCCCTGAGACTCTCCTGTGCAGCCTCTGGATTCTCCT
TCAGTAGCGGGTACGACATGTGCTGGGTCCGCCAGGCTCCAGGGAAGTGCCTGGAGTGGATCGCATGCATTGCTGCT
GGTAGTGCTGGTATCACTTACGACGCGAACTGGGCGAAAGGCCGGTTCACCATCTCCAGAGACAATTCCAAGAACAC
GCTGTATCTGCAAATGAACAGCCTGAGAGCCGAGGACACGGCCGTATATTACTGTGCGAGATCGGCGTTTTCGTTCG
ACTACGCCATGGACCTCTGGGGCCAGGGAACCCTGGTCACCGTCTCGTCTGGTGGAGGCGGTTCAGGCGGAGGTGGA
AGTGGTGGTGGCGGCTCTGGAGGCGGCGGATCTGACATCCAGATGACCCAGTCTCCTTCCACCCTGTCTGCATCTGT
AGGAGACAGAGTCACCATCACTTGCCAGGCCAGTCAGAGCATTAGTTCCCACTTAAACTGGTATCAGCAGAAACCAG
GGAAAGCCCCTAAGCTCCTGATCTATAAGGCATCCACTCTGGCATCTGGGGTCCCATCAAGGTTCAGCGGCAGTGGA
TCTGGGACAGAATTTACTCTCACCATCAGCAGCCTGCAGCCTGATGATTTTGCAACTTATTACTGCCAACAGGGTTA
TAGTTGGGGTAATGTTGATAATGTTTTCGGCTGCGGGACCAAGGTGGAGATCAAATAG
>Sequence ID 153: SI-49R26 Chain A Amino Acid Sequence
FLNSLFNQEVQIPLTESYCGPCPKNWICYKNNCYQFFDESKNWYESQASCMSQNASLLKVYSKEDQDLLKLVKSYHW
MGLVHIPTNGSWQWEDGSILSPNLLTIIEMQKGDCALYASSFKGYIENCSTPNTYICMQRTVASTKGPSVFPLAPSS
KSTSGGTAALGCLVKDYFPEPVTVSWNSGALTSGVHTFPAVLQSSGLYSLSSVVTVPSSSLGTQTYICNVNHKPSNT
KVDKRVEPKSCDKTHTCPPCPAPEAAGGPSVFLFPPKPKDTLMISRTPEVTCVVVDVSHEDPEVKFNWYVDGVEVHN
AKTKPREEQYASTYRVVSVLTVLHQDWLNGKEYKCAVSNKALPAPIEKTISKAKGQPREPQVCTLPPSRDELTKNQV
SLSCAVKGFYPSDIAVEWESNGQPENNYKTTPPVLDSDGSFFLVSKLTVDKSRWQQGNVFSCSVMHEALHNHYTQKS
LSLSPG
>Sequence ID 154: SI-49R26 Chain A Nucleotide Sequence
TTTCTTAATTCCCTTTTCAACCAAGAGGTTCAGATCCCCTTGACTGAAAGCTATTGCGGCCCTTGTCCGAAAAACTG
GATATGTTACAAGAATAATTGTTACCAATTCTTCGACGAAAGCAAGAACTGGTATGAGAGTCAGGCGTCTTGTATGA
GTCAGAATGCCAGCCTGCTTAAGGTTTATTCAAAAGAAGACCAGGATCTGCTTAAGTTGGTAAAGAGCTACCACTGG
ATGGGGCTGGTACATATCCCAACGAATGGGTCATGGCAGTGGGAGGACGGTTCTATTCTGAGTCCAAATCTCCTGAC
GATCATCGAAATGCAGAAAGGGGACTGTGCCCTGTATGCATCATCCTTCAAGGGGTACATCGAGAACTGCAGTACCC
CAAATACCTACATTTGTATGCAAAGAACGGTTGCTAGCACCAAGGGCCCATCGGTCTTCCCCCTGGCACCCTCCTCC
AAGAGCACCTCTGGGGGCACAGCGGCCCTGGGCTGCCTGGTCAAGGACTACTTCCCCGAACCGGTGACGGTGTCGTG
GAACTCAGGCGCCCTGACCAGCGGCGTGCACACCTTCCCGGCTGTCCTACAGTCCTCAGGACTCTACTCCCTCAGCA
GCGTGGTGACCGTGCCCTCCAGCAGCTTGGGCACCCAGACCTACATCTGCAACGTGAATCACAAGCCCAGCAACACC
AAGGTGGACAAGAGAGTTGAGCCCAAATCTTGTGACAAAACTCACACATGCCCACCGTGCCCAGCACCTGAAGCCGC
GGGGGGACCGTCAGTCTTCCTCTTCCCCCCAAAACCCAAGGACACCCTCATGATCTCCCGGACCCCTGAGGTCACAT
GCGTGGTGGTGGACGTGAGCCACGAAGACCCTGAGGTCAAGTTCAACTGGTACGTGGACGGCGTGGAGGTGCATAAT
GCCAAGACAAAGCCGCGGGAGGAGCAGTACGCCAGCACGTACCGTGTGGTCAGCGTCCTCACCGTCCTGCACCAGGA
CTGGCTGAATGGCAAGGAGTACAAGTGCGCGGTCTCCAACAAAGCCCTCCCAGCCCCCATCGAGAAAACCATCTCCA
AAGCCAAAGGGCAGCCCCGAGAACCACAGGTGTGTACCCTGCCCCCATCCCGGGATGAGCTGACCAAGAACCAGGTC
AGCCTGTCCTGCGCCGTCAAAGGCTTCTATCCCAGCGACATCGCCGTGGAGTGGGAGAGCAATGGGCAGCCGGAGAA
CAACTACAAGACCACGCCTCCCGTGCTGGACTCCGACGGCTCCTTCTTCCTCGTGAGCAAGCTCACCGTGGACAAGA
GCAGGTGGCAGCAGGGGAACGTCTTCTCATGCTCCGTGATGCATGAGGCTCTGCACAACCACTACACGCAGAAGAGC
CTCTCCCTGTCTCCGGGTTAA
>Sequence ID 155: SI-49R26 Chain B Amino Acid Sequence
FLNSLFNQEVQIPLTESYCGPCPKNWICYKNNCYQFFDESKNWYESQASCMSQNASLLKVYSKEDQDLLKLVKSYHW
MGLVHIPTNGSWQWEDGSILSPNLLTIIEMQKGDCALYASSFKGYIENCSTPNTYICMQRTVRTVAAPSVFIFPPSD
EQLKSGTASVVCLLNNFYPREAKVQWKVDNALQSGNSQESVTEQDSKDSTYSLSSTLTLSKADYEKHKVYACEVTHQ
GLSSPVTKSFNRGECGGDKTHTCPPCPAPEAAGGPSVFLFPPKPKDTLMISRTPEVTCVVVDVSHEDPEVKFNWYVD
GVEVHNAKTKPREEQYASTYRVVSVLTVLHQDWLNGKEYKCAVSNKALPAPIEKTISKAKGQPREPQVYTLPPCRDE
LTKNQVSLWCLVKGFYPSDIAVEWESNGQPENNYKTTPPVLDSDGSFFLYSKLTVDKSRWQQGNVFSCSVMHEALHN
HYTQKSLSLSPG
>Sequence ID 156: SI-49R26 Chain B Nucleotide Sequence
TTCCTAAACTCATTATTCAACCAAGAAGTTCAAATTCCCTTGACCGAAAGTTACTGTGGCCCATGTCCTAAAAACTG
GATATGTTACAAAAATAACTGCTACCAATTTTTTGATGAGAGTAAAAACTGGTATGAGAGCCAGGCTTCTTGTATGT
CTCAAAATGCCAGCCTTCTGAAAGTATACAGCAAAGAGGACCAGGATTTACTTAAACTGGTGAAGTCATATCATTGG
ATGGGACTAGTACACATTCCAACAAATGGATCTTGGCAGTGGGAAGATGGCTCCATTCTCTCACCCAACCTACTAAC
AATAATTGAAATGCAGAAGGGAGACTGTGCACTCTATGCCTCGAGCTTTAAAGGCTATATAGAAAACTGTTCAACTC
CAAATACGTACATCTGCATGCAAAGGACTGTGCGTACGGTGGCTGCACCATCTGTCTTCATCTTCCCGCCATCTGAT
GAGCAGTTGAAATCTGGAACTGCCTCTGTTGTGTGCCTGCTGAATAACTTCTATCCCAGAGAGGCCAAAGTACAGTG
GAAGGTGGATAACGCCCTCCAATCGGGTAACTCCCAGGAGAGTGTCACAGAGCAGGACAGCAAGGACAGCACCTACA
GCCTCAGCAGCACCCTGACGCTGAGCAAAGCAGACTACGAGAAACACAAAGTCTACGCCTGCGAAGTCACCCATCAG
GGCCTGAGCTCGCCCGTCACAAAGAGCTTCAACAGGGGAGAGTGTGGAGGCGACAAAACTCACACATGCCCACCGTG
CCCAGCACCTGAAGCCGCGGGGGGACCGTCAGTCTTCCTCTTCCCCCCAAAACCCAAGGACACCCTCATGATCTCCC
GGACCCCTGAGGTCACATGCGTGGTGGTGGACGTGAGCCACGAAGACCCTGAGGTCAAGTTCAACTGGTACGTGGAC
GGCGTGGAGGTGCATAATGCCAAGACAAAGCCGCGGGAGGAGCAGTACGCCAGCACGTACCGTGTGGTCAGCGTCCT
CACCGTCCTGCACCAGGACTGGCTGAATGGCAAGGAGTACAAGTGCGCGGTCTCCAACAAAGCCCTCCCAGCCCCCA
TCGAGAAAACCATCTCCAAAGCCAAAGGGCAGCCCCGAGAACCACAGGTGTACACCCTGCCCCCATGTCGGGATGAG
CTGACCAAGAACCAGGTCAGCCTGTGGTGCCTGGTCAAAGGCTTCTATCCCAGCGACATCGCCGTGGAGTGGGAGAG
CAATGGGCAGCCGGAGAACAACTACAAGACCACGCCTCCCGTGCTGGACTCCGACGGCTCCTTCTTCCTCTATAGCA
AGCTCACCGTGGACAAGAGCAGGTGGCAGCAGGGGAACGTCTTCTCATGCTCCGTGATGCATGAGGCTCTGCACAAC
CACTACACGCAGAAGAGCCTCTCCCTGTCTCCGGGTTAA
>Sequence ID 157: SI-49R27 Chain A Amino Acid Sequence
EIVMTQSPSTLSASVGDRVIITCQASESISSWLAWYQQKPGKAPKLLIYEASKLASGVPSRFSGSGSGAEFTLTISS
LQPDDFATYYCQGYFYFISRTYVNSFGCGTKLTVLGSTGSGSKPGSGEGSTKGEVQLVESGGGLVQPGGSLRLSCTA
SGFTISTNAMSWVRQAPGKCLEWVGVITGRDITYYASWAKGRFTISRDTSKNTVYLQMNSLRAEDTAVYYCARDGGS
SAITSNNIWGQGTLVTVSTGGGGSGGGGSFLNSLFNQEVQIPLTESYCGPCPKNWICYKNNCYQFFDESKNWYESQA
SCMSQNASLLKVYSKEDQDLLKLVKSYHWMGLVHIPTNGSWQWEDGSILSPNLLTIIEMQKGDCALYASSFKGYIEN
CSTPNTYICMQRTVASTKGPSVFPLAPSSKSTSGGTAALGCLVKDYFPEPVTVSWNSGALTSGVHTFPAVLQSSGLY
SLSSVVTVPSSSLGTQTYICNVNHKPSNTKVDKRVEPKSCDKTHTCPPCPAPEAAGGPSVFLFPPKPKDTLMISRTP
EVTCVVVDVSHEDPEVKFNWYVDGVEVHNAKTKPREEQYASTYRVVSVLTVLHQDWLNGKEYKCAVSNKALPAPIEK
TISKAKGQPREPQVCTLPPSRDELTKNQVSLSCAVKGFYPSDIAVEWESNGQPENNYKTTPPVLDSDGSFFLVSKLT
VDKSRWQQGNVFSCSVMHEALHNHYTQKSLSLSPG
>Sequence ID 158: SI-49R27 Chain A Nucleotide Sequence
GAGATCGTGATGACACAATCTCCATCTACGCTCTCCGCCTCAGTGGGCGATAGAGTAATTATTACTTGTCAAGCCTC
AGAGAGCATTTCATCATGGCTCGCCTGGTATCAGCAAAAGCCTGGGAAGGCCCCCAAACTTCTCATCTATGAAGCAT
CAAAGCTGGCCTCTGGGGTTCCGTCTCGCTTCTCCGGGTCCGGCAGTGGTGCAGAGTTTACGTTGACTATATCTTCT
TTGCAACCTGACGATTTCGCAACATATTATTGCCAGGGATACTTTTATTTTATTTCCCGAACATATGTTAACTCTTT
TGGGTGCGGGACCAAACTCACTGTGCTGGGGTCTACCGGTAGTGGTTCTAAGCCTGGTTCAGGCGAAGGCAGTACGA
AAGGGGAAGTGCAACTGGTCGAAAGCGGTGGAGGGCTTGTTCAACCTGGAGGAAGCCTCCGCTTGTCCTGCACGGCT
AGCGGCTTTACAATAAGTACGAACGCCATGAGCTGGGTCCGGCAGGCTCCAGGTAAGTGTCTCGAATGGGTGGGGGT
CATAACAGGCAGGGACATTACCTACTACGCCAGTTGGGCCAAGGGTCGATTTACCATTTCTAGAGATACATCCAAGA
ACACGGTGTACCTCCAGATGAATTCTCTTAGGGCGGAAGACACAGCAGTATACTACTGCGCGCGAGATGGCGGGAGC
AGTGCGATCACATCCAACAACATCTGGGGTCAGGGCACTCTTGTCACGGTGTCGACTGGCGGTGGAGGGTCCGGCGG
TGGTGGATCATTTCTTAATTCCCTTTTCAACCAAGAGGTTCAGATCCCCTTGACTGAAAGCTATTGCGGCCCTTGTC
CGAAAAACTGGATATGTTACAAGAATAATTGTTACCAATTCTTCGACGAAAGCAAGAACTGGTATGAGAGTCAGGCG
TCTTGTATGAGTCAGAATGCCAGCCTGCTTAAGGTTTATTCAAAAGAAGACCAGGATCTGCTTAAGTTGGTAAAGAG
CTACCACTGGATGGGGCTGGTACATATCCCAACGAATGGGTCATGGCAGTGGGAGGACGGTTCTATTCTGAGTCCAA
ATCTCCTGACGATCATCGAAATGCAGAAAGGGGACTGTGCCCTGTATGCATCATCCTTCAAGGGGTACATCGAGAAC
TGCAGTACCCCAAATACCTACATTTGTATGCAAAGAACGGTTGCTAGCACCAAGGGCCCATCGGTCTTCCCCCTGGC
ACCCTCCTCCAAGAGCACCTCTGGGGGCACAGCGGCCCTGGGCTGCCTGGTCAAGGACTACTTCCCCGAACCGGTGA
CGGTGTCGTGGAACTCAGGCGCCCTGACCAGCGGCGTGCACACCTTCCCGGCTGTCCTACAGTCCTCAGGACTCTAC
TCCCTCAGCAGCGTGGTGACCGTGCCCTCCAGCAGCTTGGGCACCCAGACCTACATCTGCAACGTGAATCACAAGCC
CAGCAACACCAAGGTGGACAAGAGAGTTGAGCCCAAATCTTGTGACAAAACTCACACATGCCCACCGTGCCCAGCAC
CTGAAGCCGCGGGGGGACCGTCAGTCTTCCTCTTCCCCCCAAAACCCAAGGACACCCTCATGATCTCCCGGACCCCT
GAGGTCACATGCGTGGTGGTGGACGTGAGCCACGAAGACCCTGAGGTCAAGTTCAACTGGTACGTGGACGGCGTGGA
GGTGCATAATGCCAAGACAAAGCCGCGGGAGGAGCAGTACGCCAGCACGTACCGTGTGGTCAGCGTCCTCACCGTCC
TGCACCAGGACTGGCTGAATGGCAAGGAGTACAAGTGCGCGGTCTCCAACAAAGCCCTCCCAGCCCCCATCGAGAAA
ACCATCTCCAAAGCCAAAGGGCAGCCCCGAGAACCACAGGTGTGTACCCTGCCCCCATCCCGGGATGAGCTGACCAA
GAACCAGGTCAGCCTGTCCTGCGCCGTCAAAGGCTTCTATCCCAGCGACATCGCCGTGGAGTGGGAGAGCAATGGGC
AGCCGGAGAACAACTACAAGACCACGCCTCCCGTGCTGGACTCCGACGGCTCCTTCTTCCTCGTGAGCAAGCTCACC
GTGGACAAGAGCAGGTGGCAGCAGGGGAACGTCTTCTCATGCTCCGTGATGCATGAGGCTCTGCACAACCACTACAC
GCAGAAGAGCCTCTCCCTGTCTCCGGGTTAA
>Sequence ID 159: SI-49R27 Chain B Amino Acid Sequence
FLNSLFNQEVQIPLTESYCGPCPKNWICYKNNCYQFFDESKNWYESQASCMSQNASLLKVYSKEDQDLLKLVKSYHW
MGLVHIPTNGSWQWEDGSILSPNLLTIIEMQKGDCALYASSFKGYIENCSTPNTYICMQRTVRTVAAPSVFIFPPSD
EQLKSGTASVVCLLNNFYPREAKVQWKVDNALQSGNSQESVTEQDSKDSTYSLSSTLTLSKADYEKHKVYACEVTHQ
GLSSPVTKSFNRGECGGDKTHTCPPCPAPEAAGGPSVFLFPPKPKDTLMISRTPEVTCVVVDVSHEDPEVKFNWYVD
GVEVHNAKTKPREEQYASTYRVVSVLTVLHQDWLNGKEYKCAVSNKALPAPIEKTISKAKGQPREPQVYTLPPCRDE
LTKNQVSLWCLVKGEYPSDIAVEWESNGQPENNYKTTPPVLDSDGSFFLYSKLTVDKSRWQQGNVFSCSVMHEALHN
HYTQKSLSLSPG
>Sequence ID 160: SI-49R27 Chain B Nucleotide Sequences
TTCCTAAACTCATTATTCAACCAAGAAGTTCAAATTCCCTTGACCGAAAGTTACTGTGGCCCATGTCCTAAAAACTG
GATATGTTACAAAAATAACTGCTACCAATTTTTTGATGAGAGTAAAAACTGGTATGAGAGCCAGGCTTCTTGTATGT
CTCAAAATGCCAGCCTTCTGAAAGTATACAGCAAAGAGGACCAGGATTTACTTAAACTGGTGAAGTCATATCATTGG
ATGGGACTAGTACACATTCCAACAAATGGATCTTGGCAGTGGGAAGATGGCTCCATTCTCTCACCCAACCTACTAAC
AATAATTGAAATGCAGAAGGGAGACTGTGCACTCTATGCCTCGAGCTTTAAAGGCTATATAGAAAACTGTTCAACTC
CAAATACGTACATCTGCATGCAAAGGACTGTGCGTACGGTGGCTGCACCATCTGTCTTCATCTTCCCGCCATCTGAT
GAGCAGTTGAAATCTGGAACTGCCTCTGTTGTGTGCCTGCTGAATAACTTCTATCCCAGAGAGGCCAAAGTACAGTG
GAAGGTGGATAACGCCCTCCAATCGGGTAACTCCCAGGAGAGTGTCACAGAGCAGGACAGCAAGGACAGCACCTACA
GCCTCAGCAGCACCCTGACGCTGAGCAAAGCAGACTACGAGAAACACAAAGTCTACGCCTGCGAAGTCACCCATCAG
GGCCTGAGCTCGCCCGTCACAAAGAGCTTCAACAGGGGAGAGTGTGGAGGCGACAAAACTCACACATGCCCACCGTG
CCCAGCACCTGAAGCCGCGGGGGGACCGTCAGTCTTCCTCTTCCCCCCAAAACCCAAGGACACCCTCATGATCTCCC
GGACCCCTGAGGTCACATGCGTGGTGGTGGACGTGAGCCACGAAGACCCTGAGGTCAAGTTCAACTGGTACGTGGAC
GGCGTGGAGGTGCATAATGCCAAGACAAAGCCGCGGGAGGAGCAGTACGCCAGCACGTACCGTGTGGTCAGCGTCCT
CACCGTCCTGCACCAGGACTGGCTGAATGGCAAGGAGTACAAGTGCGCGGTCTCCAACAAAGCCCTCCCAGCCCCCA
TCGAGAAAACCATCTCCAAAGCCAAAGGGCAGCCCCGAGAACCACAGGTGTACACCCTGCCCCCATGTCGGGATGAG
CTGACCAAGAACCAGGTCAGCCTGTGGTGCCTGGTCAAAGGCTTCTATCCCAGCGACATCGCCGTGGAGTGGGAGAG
CAATGGGCAGCCGGAGAACAACTACAAGACCACGCCTCCCGTGCTGGACTCCGACGGCTCCTTCTTCCTCTATAGCA
AGCTCACCGTGGACAAGAGCAGGTGGCAGCAGGGGAACGTCTTCTCATGCTCCGTGATGCATGAGGCTCTGCACAAC
CACTACACGCAGAAGAGCCTCTCCCTGTCTCCGGGTTAA
>Sequence ID 161: SI-49R25 Chain A Amino Acid Sequence
EIVMTQSPSTLSASVGDRVIITCQASESISSWLAWYQQKPGKAPKLLIYEASKLASGVPSRFSGSGSGAEFTLTISS
LQPDDFATYYCQGYFYFISRTYVNSFGCGTKLTVLGSTGSGSKPGSGEGSTKGEVQLVESGGGLVQPGGSLRLSCTA
SGFTISTNAMSWVRQAPGKCLEWVGVITGRDITYYASWAKGRFTISRDTSKNTVYLQMNSLRAEDTAVYYCARDGGS
SAITSNNIWGQGTLVTVSTGGGGSGGGGSFLNSLFNQEVQIPLTESYCGPCPKNWICYKNNCYQFFDESKNWYESQA
SCMSQNASLLKVYSKEDQDLLKLVKSYHWMGLVHIPTNGSWQWEDGSILSPNLLTIIEMQKGDCALYASSFKGYIEN
CSTPNTYICMQRTVASTKGPSVFPLAPSSKSTSGGTAALGCLVKDYFPEPVTVSWNSGALTSGVHTFPAVLQSSGLY
SLSSVVTVPSSSLGTQTYICNVNHKPSNTKVDKRVEPKSCDKTHTCPPCPAPEAAGGPSVFLFPPKPKDTLMISRTP
EVTCVVVDVSHEDPEVKFNWYVDGVEVHNAKTKPREEQYASTYRVVSVLTVLHQDWLNGKEYKCAVSNKALPAPIEK
TISKAKGQPREPQVCTLPPSRDELTKNQVSLSCAVKGFYPSDIAVEWESNGQPENNYKTTPPVLDSDGSFFLVSKLT
VDKSRWQQGNVFSCSVMHEALHNHYTQKSLSLSPG
>Sequence ID 162: SI-49R25 Chain A Nucleotide Sequence
GAGATCGTGATGACACAATCTCCATCTACGCTCTCCGCCTCAGTGGGCGATAGAGTAATTATTACTTGTCAAGCCTC
AGAGAGCATTTCATCATGGCTCGCCTGGTATCAGCAAAAGCCTGGGAAGGCCCCCAAACTTCTCATCTATGAAGCAT
CAAAGCTGGCCTCTGGGGTTCCGTCTCGCTTCTCCGGGTCCGGCAGTGGTGCAGAGTTTACGTTGACTATATCTTCT
TTGCAACCTGACGATTTCGCAACATATTATTGCCAGGGATACTTTTATTTTATTTCCCGAACATATGTTAACTCTTT
TGGGTGCGGGACCAAACTCACTGTGCTGGGGTCTACCGGTAGTGGTTCTAAGCCTGGTTCAGGCGAAGGCAGTACGA
AAGGGGAAGTGCAACTGGTCGAAAGCGGTGGAGGGCTTGTTCAACCTGGAGGAAGCCTCCGCTTGTCCTGCACGGCT
AGCGGCTTTACAATAAGTACGAACGCCATGAGCTGGGTCCGGCAGGCTCCAGGTAAGTGTCTCGAATGGGTGGGGGT
CATAACAGGCAGGGACATTACCTACTACGCCAGTTGGGCCAAGGGTCGATTTACCATTTCTAGAGATACATCCAAGA
ACACGGTGTACCTCCAGATGAATTCTCTTAGGGCGGAAGACACAGCAGTATACTACTGCGCGCGAGATGGCGGGAGC
AGTGCGATCACATCCAACAACATCTGGGGTCAGGGCACTCTTGTCACGGTGTCGACTGGCGGTGGAGGGTCCGGCGG
TGGTGGATCATTTCTTAATTCCCTTTTCAACCAAGAGGTTCAGATCCCCTTGACTGAAAGCTATTGCGGCCCTTGTC
CGAAAAACTGGATATGTTACAAGAATAATTGTTACCAATTCTTCGACGAAAGCAAGAACTGGTATGAGAGTCAGGCG
TCTTGTATGAGTCAGAATGCCAGCCTGCTTAAGGTTTATTCAAAAGAAGACCAGGATCTGCTTAAGTTGGTAAAGAG
CTACCACTGGATGGGGCTGGTACATATCCCAACGAATGGGTCATGGCAGTGGGAGGACGGTTCTATTCTGAGTCCAA
ATCTCCTGACGATCATCGAAATGCAGAAAGGGGACTGTGCCCTGTATGCATCATCCTTCAAGGGGTACATCGAGAAC
TGCAGTACCCCAAATACCTACATTTGTATGCAAAGAACGGTTGCTAGCACCAAGGGCCCATCGGTCTTCCCCCTGGC
ACCCTCCTCCAAGAGCACCTCTGGGGGCACAGCGGCCCTGGGCTGCCTGGTCAAGGACTACTTCCCCGAACCGGTGA
CGGTGTCGTGGAACTCAGGCGCCCTGACCAGCGGCGTGCACACCTTCCCGGCTGTCCTACAGTCCTCAGGACTCTAC
TCCCTCAGCAGCGTGGTGACCGTGCCCTCCAGCAGCTTGGGCACCCAGACCTACATCTGCAACGTGAATCACAAGCC
CAGCAACACCAAGGTGGACAAGAGAGTTGAGCCCAAATCTTGTGACAAAACTCACACATGCCCACCGTGCCCAGCAC
CTGAAGCCGCGGGGGGACCGTCAGTCTTCCTCTTCCCCCCAAAACCCAAGGACACCCTCATGATCTCCCGGACCCCT
GAGGTCACATGCGTGGTGGTGGACGTGAGCCACGAAGACCCTGAGGTCAAGTTCAACTGGTACGTGGACGGCGTGGA
GGTGCATAATGCCAAGACAAAGCCGCGGGAGGAGCAGTACGCCAGCACGTACCGTGTGGTCAGCGTCCTCACCGTCC
TGCACCAGGACTGGCTGAATGGCAAGGAGTACAAGTGCGCGGTCTCCAACAAAGCCCTCCCAGCCCCCATCGAGAAA
ACCATCTCCAAAGCCAAAGGGCAGCCCCGAGAACCACAGGTGTGTACCCTGCCCCCATCCCGGGATGAGCTGACCAA
GAACCAGGTCAGCCTGTCCTGCGCCGTCAAAGGCTTCTATCCCAGCGACATCGCCGTGGAGTGGGAGAGCAATGGGC
AGCCGGAGAACAACTACAAGACCACGCCTCCCGTGCTGGACTCCGACGGCTCCTTCTTCCTCGTGAGCAAGCTCACC
GTGGACAAGAGCAGGTGGCAGCAGGGGAACGTCTTCTCATGCTCCGTGATGCATGAGGCTCTGCACAACCACTACAC
GCAGAAGAGCCTCTCCCTGTCTCCGGGTTAA
>Sequence ID 163: SI-49R25 Chain B Amino Acid Sequence
ENVLTQSPASLSASPGERVTITCSASSSVSYMHWYQQKPGQAPKLWIYDTSKLASGVPSRFSGSGSGNDHTLTISSM
EPEDFATYYCFQGSVYPFTFGQGTKLEIKGSTGSGSKPGSGEGSTKGQVTLKESGPGLVQPGQTLRLTCAFSGFSLS
TSGMGVGWIRQPPGKGLEWLAHIWWDDDKRYNPALKSRLTISKDTSKNQVYLQMNSLDAEDTAVYYCARMELWSYYF
DYWGQGTLVTVSTGGGGSGGGGSFLNSLFNQEVQIPLTESYCGPCPKNWICYKNNCYQFFDESKNWYESQASCMSQN
ASLLKVYSKEDQDLLKLVKSYHWMGLVHIPTNGSWQWEDGSILSPNLLTIIEMQKGDCALYASSFKGYIENCSTPNT
YICMQRTVRTVAAPSVFIFPPSDEQLKSGTASVVCLLNNFYPREAKVQWKVDNALQSGNSQESVTEQDSKDSTYSLS
STLTLSKADYEKHKVYACEVTHQGLSSPVTKSFNRGECGGDKTHTCPPCPAPEAAGGPSVFLFPPKPKDTLMISRTP
EVTCVVVDVSHEDPEVKFNWYVDGVEVHNAKTKPREEQYASTYRVVSVLTVLHQDWLNGKEYKCAVSNKALPAPIEK
TISKAKGQPREPQVYTLPPCRDELTKNQVSLWCLVKGFYPSDIAVEWESNGQPENNYKTTPPVLDSDGSFFLYSKLT
VDKSRWQQGNVFSCSVMHEALHNHYTQKSLSLSPG
>Sequence ID 164: SI-49R25 Chain B Nucleotide Sequence
GAAAATGTATTGACACAGAGCCCCGCCTCCCTCAGTGCCTCACCTGGGGAAAGGGTAACTATCACTTGCTCTGCATC
AAGCAGCGTCTCATACATGCATTGGTATCAACAAAAGCCTGGACAGGCCCCCAAGCTCTGGATATACGATACGAGCA
AGCTGGCTTCCGGCGTACCTAGCCGCTTCAGTGGTTCCGGCTCAGGCAACGATCACACCCTTACGATTTCCAGTATG
GAACCCGAAGATTTTGCAACTTATTATTGTTTCCAGGGGAGCGTGTACCCATTCACTTTCGGGCAGGGGACAAAATT
GGAGATAAAGGGAAGTACTGGTTCTGGGTCTAAACCCGGTTCCGGCGAAGGTAGTACTAAAGGACAGGTCACATTGA
AGGAATCTGGCCCCGGCCTTGTTCAGCCAGGACAGACCCTTAGGCTCACCTGTGCCTTCAGTGGTTTTTCTCTTAGC
ACTAGCGGTATGGGGGTCGGCTGGATTCGGCAGCCTCCCGGCAAAGGTCTTGAGTGGTTGGCTCACATTTGGTGGGA
CGACGACAAACGGTATAATCCTGCCTTGAAAAGTCGGCTGACCATTAGTAAGGATACCTCAAAAAATCAAGTGTACT
TGCAAATGAATAGCCTTGACGCCGAGGATACGGCTGTATATTATTGCGCGCGGATGGAACTCTGGTCTTACTACTTT
GATTATTGGGGGCAGGGGACTCTCGTCACGGTGTCGACTGGCGGTGGAGGGTCCGGCGGTGGTGGATCATTCCTAAA
CTCATTATTCAACCAAGAAGTTCAAATTCCCTTGACCGAAAGTTACTGTGGCCCATGTCCTAAAAACTGGATATGTT
ACAAAAATAACTGCTACCAATTTTTTGATGAGAGTAAAAACTGGTATGAGAGCCAGGCTTCTTGTATGTCTCAAAAT
GCCAGCCTTCTGAAAGTATACAGCAAAGAGGACCAGGATTTACTTAAACTGGTGAAGTCATATCATTGGATGGGACT
AGTACACATTCCAACAAATGGATCTTGGCAGTGGGAAGATGGCTCCATTCTCTCACCCAACCTACTAACAATAATTG
AAATGCAGAAGGGAGACTGTGCACTCTATGCCTCGAGCTTTAAAGGCTATATAGAAAACTGTTCAACTCCAAATACG
TACATCTGCATGCAAAGGACTGTGCGTACGGTGGCTGCACCATCTGTCTTCATCTTCCCGCCATCTGATGAGCAGTT
GAAATCTGGAACTGCCTCTGTTGTGTGCCTGCTGAATAACTTCTATCCCAGAGAGGCCAAAGTACAGTGGAAGGTGG
ATAACGCCCTCCAATCGGGTAACTCCCAGGAGAGTGTCACAGAGCAGGACAGCAAGGACAGCACCTACAGCCTCAGC
AGCACCCTGACGCTGAGCAAAGCAGACTACGAGAAACACAAAGTCTACGCCTGCGAAGTCACCCATCAGGGCCTGAG
CTCGCCCGTCACAAAGAGCTTCAACAGGGGAGAGTGTGGAGGCGACAAAACTCACACATGCCCACCGTGCCCAGCAC
CTGAAGCCGCGGGGGGACCGTCAGTCTTCCTCTTCCCCCCAAAACCCAAGGACACCCTCATGATCTCCCGGACCCCT
GAGGTCACATGCGTGGTGGTGGACGTGAGCCACGAAGACCCTGAGGTCAAGTTCAACTGGTACGTGGACGGCGTGGA
GGTGCATAATGCCAAGACAAAGCCGCGGGAGGAGCAGTACGCCAGCACGTACCGTGTGGTCAGCGTCCTCACCGTCC
TGCACCAGGACTGGCTGAATGGCAAGGAGTACAAGTGCGCGGTCTCCAACAAAGCCCTCCCAGCCCCCATCGAGAAA
ACCATCTCCAAAGCCAAAGGGCAGCCCCGAGAACCACAGGTGTACACCCTGCCCCCATGTCGGGATGAGCTGACCAA
GAACCAGGTCAGCCTGTGGTGCCTGGTCAAAGGCTTCTATCCCAGCGACATCGCCGTGGAGTGGGAGAGCAATGGGC
AGCCGGAGAACAACTACAAGACCACGCCTCCCGTGCTGGACTCCGACGGCTCCTTCTTCCTCTATAGCAAGCTCACC
GTGGACAAGAGCAGGTGGCAGCAGGGGAACGTCTTCTCATGCTCCGTGATGCATGAGGCTCTGCACAACCACTACAC
GCAGAAGAGCCTCTCCCTGTCTCCGGGTTAA
>Sequence ID 165: SI-49P_x Chain A Amino Acid Sequence
EIVMTQSPSTLSASVGDRVIITCQASESISSWLAWYQQKPGKAPKLLIYEASKLASGVPSRFSGSGSGAEFTLTISS
LQPDDFATYYCQGYFYFISRTYVNSFGCGTKLTVLGSTGSGSKPGSGEGSTKGEVQLVESGGGLVQPGGSLRLSCTA
SGFTISTNAMSWVRQAPGKCLEWVGVITGRDITYYASWAKGRFTISRDTSKNTVYLQMNSLRAEDTAVYYCARDGGS
SAITSNNIWGQGTLVTVSTGGGGSGGGGSFLNSLFNQEVQIPLTESYCGPCPKNWICYKNNCYQFFDESKNWYESQA
SCMSQNASLLKVYSKEDQDLLKLVKSYHWMGLVHIPTNGSWQWEDGSILSPNLLTIIEMQKGDCALYASSFKGYIEN
CSTPNTYICMQRTVASTKGPSVFPLAPSSKSTSGGTAALGCLVKDYFPEPVTVSWNSGALTSGVHTFPAVLQSSGLY
SLSSVVTVPSSSLGTQTYICNVNHKPSNTKVDKRVEPKSCDKTHTCPPCPAPEAAGGPSVFLFPPKPKDTLMISRTP
EVTCVVVDVSHEDPEVKFNWYVDGVEVHNAKTKPREEQYASTYRVVSVLTVLHQDWLNGKEYKCAVSNKALPAPIEK
TISKAKGQPREPQVCTLPPSRDELTKNQVSLSCAVKGFYPSDIAVEWESNGQPENNYKTTPPVLDSDGSFFLVSKLT
VDKSRWQQGNVFSCSVMHEALHNHYTQKSLSLSPG
>Sequence ID 166: SI-49P_x Chain A Nucleotide Sequence
GAGATCGTGATGACACAATCTCCATCTACGCTCTCCGCCTCAGTGGGCGATAGAGTAATTATTACTTGTCAAGCCTC
AGAGAGCATTTCATCATGGCTCGCCTGGTATCAGCAAAAGCCTGGGAAGGCCCCCAAACTTCTCATCTATGAAGCAT
CAAAGCTGGCCTCTGGGGTTCCGTCTCGCTTCTCCGGGTCCGGCAGTGGTGCAGAGTTTACGTTGACTATATCTTCT
TTGCAACCTGACGATTTCGCAACATATTATTGCCAGGGATACTTTTATTTTATTTCCCGAACATATGTTAACTCTTT
TGGGTGCGGGACCAAACTCACTGTGCTGGGGTCTACCGGTAGTGGTTCTAAGCCTGGTTCAGGCGAAGGCAGTACGA
AAGGGGAAGTGCAACTGGTCGAAAGCGGTGGAGGGCTTGTTCAACCTGGAGGAAGCCTCCGCTTGTCCTGCACGGCT
AGCGGCTTTACAATAAGTACGAACGCCATGAGCTGGGTCCGGCAGGCTCCAGGTAAGTGTCTCGAATGGGTGGGGGT
CATAACAGGCAGGGACATTACCTACTACGCCAGTTGGGCCAAGGGTCGATTTACCATTTCTAGAGATACATCCAAGA
ACACGGTGTACCTCCAGATGAATTCTCTTAGGGCGGAAGACACAGCAGTATACTACTGCGCGCGAGATGGCGGGAGC
AGTGCGATCACATCCAACAACATCTGGGGTCAGGGCACTCTTGTCACGGTGTCGACTGGCGGTGGAGGGTCCGGCGG
TGGTGGATCATTTCTTAATTCCCTTTTCAACCAAGAGGTTCAGATCCCCTTGACTGAAAGCTATTGCGGCCCTTGTC
CGAAAAACTGGATATGTTACAAGAATAATTGTTACCAATTCTTCGACGAAAGCAAGAACTGGTATGAGAGTCAGGCG
TCTTGTATGAGTCAGAATGCCAGCCTGCTTAAGGTTTATTCAAAAGAAGACCAGGATCTGCTTAAGTTGGTAAAGAG
CTACCACTGGATGGGGCTGGTACATATCCCAACGAATGGGTCATGGCAGTGGGAGGACGGTTCTATTCTGAGTCCAA
ATCTCCTGACGATCATCGAAATGCAGAAAGGGGACTGTGCCCTGTATGCATCATCCTTCAAGGGGTACATCGAGAAC
TGCAGTACCCCAAATACCTACATTTGTATGCAAAGAACGGTTGCTAGCACCAAGGGCCCATCGGTCTTCCCCCTGGC
ACCCTCCTCCAAGAGCACCTCTGGGGGCACAGCGGCCCTGGGCTGCCTGGTCAAGGACTACTTCCCCGAACCGGTGA
CGGTGTCGTGGAACTCAGGCGCCCTGACCAGCGGCGTGCACACCTTCCCGGCTGTCCTACAGTCCTCAGGACTCTAC
TCCCTCAGCAGCGTGGTGACCGTGCCCTCCAGCAGCTTGGGCACCCAGACCTACATCTGCAACGTGAATCACAAGCC
CAGCAACACCAAGGTGGACAAGAGAGTTGAGCCCAAATCTTGTGACAAAACTCACACATGCCCACCGTGCCCAGCAC
CTGAAGCCGCGGGGGGACCGTCAGTCTTCCTCTTCCCCCCAAAACCCAAGGACACCCTCATGATCTCCCGGACCCCT
GAGGTCACATGCGTGGTGGTGGACGTGAGCCACGAAGACCCTGAGGTCAAGTTCAACTGGTACGTGGACGGCGTGGA
GGTGCATAATGCCAAGACAAAGCCGCGGGAGGAGCAGTACGCCAGCACGTACCGTGTGGTCAGCGTCCTCACCGTCC
TGCACCAGGACTGGCTGAATGGCAAGGAGTACAAGTGCGCGGTCTCCAACAAAGCCCTCCCAGCCCCCATCGAGAAA
ACCATCTCCAAAGCCAAAGGGCAGCCCCGAGAACCACAGGTGTGTACCCTGCCCCCATCCCGGGATGAGCTGACCAA
GAACCAGGTCAGCCTGTCCTGCGCCGTCAAAGGCTTCTATCCCAGCGACATCGCCGTGGAGTGGGAGAGCAATGGGC
AGCCGGAGAACAACTACAAGACCACGCCTCCCGTGCTGGACTCCGACGGCTCCTTCTTCCTCGTGAGCAAGCTCACC
GTGGACAAGAGCAGGTGGCAGCAGGGGAACGTCTTCTCATGCTCCGTGATGCATGAGGCTCTGCACAACCACTACAC
GCAGAAGAGCCTCTCCCTGTCTCCGGGTTAA
>Sequence ID 167: SI-49P_x Chain B Amino Acid Sequence
ENVLTQSPASLSASPGERVTITCSASSSVSYMHWYQQKPGQAPKLWIYDTSKLASGVPSRFSGSGSGNDHTLTISSM
EPEDFATYYCFQGSVYPFTFGQGTKLEIKGSTGSGSKPGSGEGSTKGQVTLKESGPGLVQPGQTLRLTCAFSGFSLS
TSGMGVGWIRQPPGKGLEWLAHIWWDDDKRYNPALKSRLTISKDTSKNQVYLQMNSLDAEDTAVYYCARMELWSYYF
DYWGQGTLVTVSTGGGGSGGGGSFLNSLFNQEVQIPLTESYCGPCPKNWICYKNNCYQFFDESKNWYESQASCMSQN
ASLLKVYSKEDQDLLKLVKSYHWMGLVHIPTNGSWQWEDGSILSPNLLTIIEMQKGDCALYASSFKGYIENCSTPNT
YICMQRTVRTVAAPSVFIFPPSDEQLKSGTASVVCLLNNFYPREAKVQWKVDNALQSGNSQESVTEQDSKDSTYSLS
STLTLSKADYEKHKVYACEVTHQGLSSPVTKSFNRGECGGDKTHTCPPCPAPEAAGGPSVFLFPPKPKDTLMISRTP
EVTCVVVDVSHEDPEVKFNWYVDGVEVHNAKTKPREEQYASTYRVVSVLTVLHQDWLNGKEYKCAVSNKALPAPIEK
TISKAKGQPREPQVYTLPPCRDELTKNQVSLWCLVKGFYPSDIAVEWESNGQPENNYKTTPPVLDSDGSFFLYSKLT
VDKSRWQQGNVFSCSVMHEALHNHYTQKSLSLSPGGGGGSGGGGSEVQLLESGGGLVQPGGSLRLSCAASGFSFSSG
YDMCWVRQAPGKCLEWIACIAAGSAGITYDANWAKGRFTISRDNSKNTLYLQMNSLRAEDTAVYYCARSAFSFDYAM
DLWGQGTLVTVSSGGGGSGGGGSGGGGSGGGGSDIQMTQSPSTLSASVGDRVTITCQASQSISSHLNWYQQKPGKAP
KLLIYKASTLASGVPSRFSGSGSGTEFTLTISSLQPDDFATYYCQQGYSWGNVDNVFGCGTKVEIK
>Sequence ID 168: SI-49P_x Chain B Nucleotide Sequence
GAAAATGTATTGACACAGAGCCCCGCCTCCCTCAGTGCCTCACCTGGGGAAAGGGTAACTATCACTTGCTCTGCATC
AAGCAGCGTCTCATACATGCATTGGTATCAACAAAAGCCTGGACAGGCCCCCAAGCTCTGGATATACGATACGAGCA
AGCTGGCTTCCGGCGTACCTAGCCGCTTCAGTGGTTCCGGCTCAGGCAACGATCACACCCTTACGATTTCCAGTATG
GAACCCGAAGATTTTGCAACTTATTATTGTTTCCAGGGGAGCGTGTACCCATTCACTTTCGGGCAGGGGACAAAATT
GGAGATAAAGGGAAGTACTGGTTCTGGGTCTAAACCCGGTTCCGGCGAAGGTAGTACTAAAGGACAGGTCACATTGA
AGGAATCTGGCCCCGGCCTTGTTCAGCCAGGACAGACCCTTAGGCTCACCTGTGCCTTCAGTGGTTTTTCTCTTAGC
ACTAGCGGTATGGGGGTCGGCTGGATTCGGCAGCCTCCCGGCAAAGGTCTTGAGTGGTTGGCTCACATTTGGTGGGA
CGACGACAAACGGTATAATCCTGCCTTGAAAAGTCGGCTGACCATTAGTAAGGATACCTCAAAAAATCAAGTGTACT
TGCAAATGAATAGCCTTGACGCCGAGGATACGGCTGTATATTATTGCGCGCGGATGGAACTCTGGTCTTACTACTTT
GATTATTGGGGGCAGGGGACTCTCGTCACGGTGTCGACTGGCGGTGGAGGGTCCGGCGGTGGTGGATCATTCCTAAA
CTCATTATTCAACCAAGAAGTTCAAATTCCCTTGACCGAAAGTTACTGTGGCCCATGTCCTAAAAACTGGATATGTT
ACAAAAATAACTGCTACCAATTTTTTGATGAGAGTAAAAACTGGTATGAGAGCCAGGCTTCTTGTATGTCTCAAAAT
GCCAGCCTTCTGAAAGTATACAGCAAAGAGGACCAGGATTTACTTAAACTGGTGAAGTCATATCATTGGATGGGACT
AGTACACATTCCAACAAATGGATCTTGGCAGTGGGAAGATGGCTCCATTCTCTCACCCAACCTACTAACAATAATTG
AAATGCAGAAGGGAGACTGTGCACTCTATGCCTCGAGCTTTAAAGGCTATATAGAAAACTGTTCAACTCCAAATACG
TACATCTGCATGCAAAGGACTGTGCGTACGGTGGCTGCACCATCTGTCTTCATCTTCCCGCCATCTGATGAGCAGTT
GAAATCTGGAACTGCCTCTGTTGTGTGCCTGCTGAATAACTTCTATCCCAGAGAGGCCAAAGTACAGTGGAAGGTGG
ATAACGCCCTCCAATCGGGTAACTCCCAGGAGAGTGTCACAGAGCAGGACAGCAAGGACAGCACCTACAGCCTCAGC
AGCACCCTGACGCTGAGCAAAGCAGACTACGAGAAACACAAAGTCTACGCCTGCGAAGTCACCCATCAGGGCCTGAG
CTCGCCCGTCACAAAGAGCTTCAACAGGGGAGAGTGTGGAGGCGACAAAACTCACACATGCCCACCGTGCCCAGCAC
CTGAAGCCGCGGGGGGACCGTCAGTCTTCCTCTTCCCCCCAAAACCCAAGGACACCCTCATGATCTCCCGGACCCCT
GAGGTCACATGCGTGGTGGTGGACGTGAGCCACGAAGACCCTGAGGTCAAGTTCAACTGGTACGTGGACGGCGTGGA
GGTGCATAATGCCAAGACAAAGCCGCGGGAGGAGCAGTACGCCAGCACGTACCGTGTGGTCAGCGTCCTCACCGTCC
TGCACCAGGACTGGCTGAATGGCAAGGAGTACAAGTGCGCGGTCTCCAACAAAGCCCTCCCAGCCCCCATCGAGAAA
ACCATCTCCAAAGCCAAAGGGCAGCCCCGAGAACCACAGGTGTACACCCTGCCCCCATGTCGGGATGAGCTGACCAA
GAACCAGGTCAGCCTGTGGTGCCTGGTCAAAGGCTTCTATCCCAGCGACATCGCCGTGGAGTGGGAGAGCAATGGGC
AGCCGGAGAACAACTACAAGACCACGCCTCCCGTGCTGGACTCCGACGGCTCCTTCTTCCTCTATAGCAAGCTCACC
GTGGACAAGAGCAGGTGGCAGCAGGGGAACGTCTTCTCATGCTCCGTGATGCATGAGGCTCTGCACAACCACTACAC
GCAGAAGAGCCTCTCCCTGTCTCCGGGTGGCGGTGGAGGGTCCGGCGGTGGTGGATCCGAGGTGCAGCTGTTGGAGT
CTGGGGGAGGCTTGGTACAGCCTGGGGGGTCCCTGAGACTCTCCTGTGCAGCCTCTGGATTCTCCTTCAGTAGCGGG
TACGACATGTGCTGGGTCCGCCAGGCTCCAGGGAAGTGCCTGGAGTGGATCGCATGCATTGCTGCTGGTAGTGCTGG
TATCACTTACGACGCGAACTGGGCGAAAGGCCGGTTCACCATCTCCAGAGACAATTCCAAGAACACGCTGTATCTGC
AAATGAACAGCCTGAGAGCCGAGGACACGGCCGTATATTACTGTGCGAGATCGGCGTTTTCGTTCGACTACGCCATG
GACCTCTGGGGCCAGGGAACCCTGGTCACCGTCTCGTCTGGTGGAGGCGGTTCAGGCGGAGGTGGAAGTGGTGGTGG
CGGCTCTGGAGGCGGCGGATCTGACATCCAGATGACCCAGTCTCCTTCCACCCTGTCTGCATCTGTAGGAGACAGAG
TCACCATCACTTGCCAGGCCAGTCAGAGCATTAGTTCCCACTTAAACTGGTATCAGCAGAAACCAGGGAAAGCCCCT
AAGCTCCTGATCTATAAGGCATCCACTCTGGCATCTGGGGTCCCATCAAGGTTCAGCGGCAGTGGATCTGGGACAGA
ATTTACTCTCACCATCAGCAGCCTGCAGCCTGATGATTTTGCAACTTATTACTGCCAACAGGGTTATAGTTGGGGTA
ATGTTGATAATGTTTTCGGCTGCGGGACCAAGGTGGAGATCAAATAG
>Sequence ID 169: SI-49P8 Chain A Amino Acid Sequence
EIVMTQSPSTLSASVGDRVIITCQASESISSWLAWYQQKPGKAPKLLIYEASKLASGVPSRFSGSGSGAEFTLTISS
LQPDDFATYYCQGYFYFISRTYVNSFGCGTKLTVLGSTGSGSKPGSGEGSTKGEVQLVESGGGLVQPGGSLRLSCTA
SGFTISTNAMSWVRQAPGKCLEWVGVITGRDITYYASWAKGRFTISRDTSKNTVYLQMNSLRAEDTAVYYCARDGGS
SAITSNNIWGQGTLVTVSTGGGGSGGGGSFLNSLFNQEVQIPLTESYCGPCPKNWICYKNNCYQFFDESKNWYESQA
SCMSQNASLLKVYSKEDQDLLKLVKSYHWMGLVHIPTNGSWQWEDGSILSPNLLTIIEMQKGDCALYASSFKGYIEN
CSTPNTYICMQRTVASTKGPSVFPLAPSSKSTSGGTAALGCLVKDYFPEPVTVSWNSGALTSGVHTFPAVLQSSGLY
SLSSVVTVPSSSLGTQTYICNVNHKPSNTKVDKRVEPKSCDKTHTCPPCPAPEAAGGPSVFLFPPKPKDTLMISRTP
EVTCVVVDVSHEDPEVKFNWYVDGVEVHNAKTKPREEQYASTYRVVSVLTVLHQDWLNGKEYKCAVSNKALPAPIEK
TISKAKGQPREPQVCTLPPSRDELTKNQVSLSCAVKGFYPSDIAVEWESNGQPENNYKTTPPVLDSDGSFFLVSKLT
VDKSRWQQGNVFSCSVMHEALHNHYTQKSLSLSPGGGGGSGGGGSRSLVESGGGLVQPGGSLRLSCTASGFTISSYH
MQWVRQAPGKCLEYIGTISSGGNVYYASSARGRFTISRPSSKNTVDLQMNSLRAEDTAVYYCARDSGYSDPMWGQGT
LVTVSSGGGGSGGGGSGGGGSGGGGSDVVMTQSPSSVSASVGDRVTITCQASQNIRTYLSWYQQKPGKAPKLLIYAA
ANLASGVPSRFSGSGSGTDFTLTISDLEPGDAATYYCQSTYLGTDYVGGAFGCGTKVEIK
>Sequence ID 170: SI-49P8 Chain A Nucleotide Sequence
GAGATCGTGATGACACAATCTCCATCTACGCTCTCCGCCTCAGTGGGCGATAGAGTAATTATTACTTGTCAAGCCTC
AGAGAGCATTTCATCATGGCTCGCCTGGTATCAGCAAAAGCCTGGGAAGGCCCCCAAACTTCTCATCTATGAAGCAT
CAAAGCTGGCCTCTGGGGTTCCGTCTCGCTTCTCCGGGTCCGGCAGTGGTGCAGAGTTTACGTTGACTATATCTTCT
TTGCAACCTGACGATTTCGCAACATATTATTGCCAGGGATACTTTTATTTTATTTCCCGAACATATGTTAACTCTTT
TGGGTGCGGGACCAAACTCACTGTGCTGGGGTCTACCGGTAGTGGTTCTAAGCCTGGTTCAGGCGAAGGCAGTACGA
AAGGGGAAGTGCAACTGGTCGAAAGCGGTGGAGGGCTTGTTCAACCTGGAGGAAGCCTCCGCTTGTCCTGCACGGCT
AGCGGCTTTACAATAAGTACGAACGCCATGAGCTGGGTCCGGCAGGCTCCAGGTAAGTGTCTCGAATGGGTGGGGGT
CATAACAGGCAGGGACATTACCTACTACGCCAGTTGGGCCAAGGGTCGATTTACCATTTCTAGAGATACATCCAAGA
ACACGGTGTACCTCCAGATGAATTCTCTTAGGGCGGAAGACACAGCAGTATACTACTGCGCGCGAGATGGCGGGAGC
AGTGCGATCACATCCAACAACATCTGGGGTCAGGGCACTCTTGTCACGGTGTCGACTGGCGGTGGAGGGTCCGGCGG
TGGTGGATCATTTCTTAATTCCCTTTTCAACCAAGAGGTTCAGATCCCCTTGACTGAAAGCTATTGCGGCCCTTGTC
CGAAAAACTGGATATGTTACAAGAATAATTGTTACCAATTCTTCGACGAAAGCAAGAACTGGTATGAGAGTCAGGCG
TCTTGTATGAGTCAGAATGCCAGCCTGCTTAAGGTTTATTCAAAAGAAGACCAGGATCTGCTTAAGTTGGTAAAGAG
CTACCACTGGATGGGGCTGGTACATATCCCAACGAATGGGTCATGGCAGTGGGAGGACGGTTCTATTCTGAGTCCAA
ATCTCCTGACGATCATCGAAATGCAGAAAGGGGACTGTGCCCTGTATGCATCATCCTTCAAGGGGTACATCGAGAAC
TGCAGTACCCCAAATACCTACATTTGTATGCAAAGAACGGTTGCTAGCACCAAGGGCCCATCGGTCTTCCCCCTGGC
ACCCTCCTCCAAGAGCACCTCTGGGGGCACAGCGGCCCTGGGCTGCCTGGTCAAGGACTACTTCCCCGAACCGGTGA
CGGTGTCGTGGAACTCAGGCGCCCTGACCAGCGGCGTGCACACCTTCCCGGCTGTCCTACAGTCCTCAGGACTCTAC
TCCCTCAGCAGCGTGGTGACCGTGCCCTCCAGCAGCTTGGGCACCCAGACCTACATCTGCAACGTGAATCACAAGCC
CAGCAACACCAAGGTGGACAAGAGAGTTGAGCCCAAATCTTGTGACAAAACTCACACATGCCCACCGTGCCCAGCAC
CTGAAGCCGCGGGGGGACCGTCAGTCTTCCTCTTCCCCCCAAAACCCAAGGACACCCTCATGATCTCCCGGACCCCT
GAGGTCACATGCGTGGTGGTGGACGTGAGCCACGAAGACCCTGAGGTCAAGTTCAACTGGTACGTGGACGGCGTGGA
GGTGCATAATGCCAAGACAAAGCCGCGGGAGGAGCAGTACGCCAGCACGTACCGTGTGGTCAGCGTCCTCACCGTCC
TGCACCAGGACTGGCTGAATGGCAAGGAGTACAAGTGCGCGGTCTCCAACAAAGCCCTCCCAGCCCCCATCGAGAAA
ACCATCTCCAAAGCCAAAGGGCAGCCCCGAGAACCACAGGTGTGTACCCTGCCCCCATCCCGGGATGAGCTGACCAA
GAACCAGGTCAGCCTGTCCTGCGCCGTCAAAGGCTTCTATCCCAGCGACATCGCCGTGGAGTGGGAGAGCAATGGGC
AGCCGGAGAACAACTACAAGACCACGCCTCCCGTGCTGGACTCCGACGGCTCCTTCTTCCTCGTGAGCAAGCTCACC
GTGGACAAGAGCAGGTGGCAGCAGGGGAACGTCTTCTCATGCTCCGTGATGCATGAGGCTCTGCACAACCACTACAC
GCAGAAGAGCCTCTCCCTGTCTCCGGGTGGCGGTGGAGGGTCCGGCGGTGGTGGATCCCGGTCGCTGGTGGAGTCTG
GGGGAGGCTTGGTCCAGCCTGGGGGGTCCCTGAGACTCTCCTGTACTGCCTCTGGATTCACCATCAGTAGCTACCAC
ATGCAGTGGGTCCGGCAGGCACCTGGGAAGTGCCTGGAGTACATCGGAACCATTAGTAGTGGTGGTAATGTATACTA
CGCAAGCTCCGCTAGAGGCAGATTCACCATCTCCAGACCCTCGTCCAAGAACACGGTGGATCTTCAAATGAACAGCC
TGAGAGCCGAGGACACGGCTGTGTATTACTGTGCGAGAGACTCTGGTTATAGTGATCCTATGTGGGGCCAGGGAACC
CTGGTCACCGTCTCTTCAGGCGGTGGCGGTAGTGGGGGAGGCGGTTCTGGCGGCGGAGGGTCCGGCGGTGGAGGATC
AGACGTTGTGATGACCCAGTCTCCATCTTCCGTGTCTGCATCTGTAGGAGACAGAGTCACCATCACCTGTCAGGCCA
GTCAGAACATTAGGACTTACTTATCCTGGTATCAGCAGAAACCAGGGAAAGCCCCTAAGCTCCTGATCTATGCTGCA
GCCAATCTGGCATCTGGGGTCCCATCAAGGTTCAGCGGCAGTGGATCTGGGACAGATTTCACTCTCACCATCAGCGA
CTTGGAACCTGGCGATGCTGCAACTTACTATTGTCAGTCTACCTATCTTGGTACTGATTATGTTGGCGGTGCTTTCG
GCTGTGGGACCAAGGTGGAGATCAAATGA
>Sequence ID 171: SI-49P8 Chain B Amino Acid Sequence
ENVLTQSPASLSASPGERVTITCSASSSVSYMHWYQQKPGQAPKLWIYDTSKLASGVPSRFSGSGSGNDHTLTISSM
EPEDFATYYCFQGSVYPFTFGQGTKLEIKGSTGSGSKPGSGEGSTKGQVTLKESGPGLVQPGQTLRLTCAFSGFSLS
TSGMGVGWIRQPPGKGLEWLAHIWWDDDKRYNPALKSRLTISKDTSKNQVYLQMNSLDAEDTAVYYCARMELWSYYF
DYWGQGTLVTVSTGGGGSGGGGSFLNSLFNQEVQIPLTESYCGPCPKNWICYKNNCYQFFDESKNWYESQASCMSQN
ASLLKVYSKEDQDLLKLVKSYHWMGLVHIPTNGSWQWEDGSILSPNLLTIIEMQKGDCALYASSFKGYIENCSTPNT
YICMQRTVRTVAAPSVFIFPPSDEQLKSGTASVVCLLNNFYPREAKVQWKVDNALQSGNSQESVTEQDSKDSTYSLS
STLTLSKADYEKHKVYACEVTHQGLSSPVTKSFNRGECGGDKTHTCPPCPAPEAAGGPSVFLFPPKPKDTLMISRTP
EVTCVVVDVSHEDPEVKFNWYVDGVEVHNAKTKPREEQYASTYRVVSVLTVLHQDWLNGKEYKCAVSNKALPAPIEK
TISKAKGQPREPQVYTLPPCRDELTKNQVSLWCLVKGEYPSDIAVEWESNGQPENNYKTTPPVLDSDGSFFLYSKLT
VDKSRWQQGNVFSCSVMHEALHNHYTQKSLSLSPGGGGGSGGGGSEVQLLESGGGLVQPGGSLRLSCAASGFSFSSG
YDMCWVRQAPGKCLEWIACIAAGSAGITYDANWAKGRFTISRDNSKNTLYLQMNSLRAEDTAVYYCARSAFSFDYAM
DLWGQGTLVTVSSGGGGSGGGGSGGGGSGGGGSDIQMTQSPSTLSASVGDRVTITCQASQSISSHLNWYQQKPGKAP
KLLIYKASTLASGVPSRFSGSGSGTEFTLTISSLQPDDFATYYCQQGYSWGNVDNVFGCGTKVEIK
>Sequence ID 172: SI-49P8 Chain B Nucleotide Sequence
GAAAATGTATTGACACAGAGCCCCGCCTCCCTCAGTGCCTCACCTGGGGAAAGGGTAACTATCACTTGCTCTGCATC
AAGCAGCGTCTCATACATGCATTGGTATCAACAAAAGCCTGGACAGGCCCCCAAGCTCTGGATATACGATACGAGCA
AGCTGGCTTCCGGCGTACCTAGCCGCTTCAGTGGTTCCGGCTCAGGCAACGATCACACCCTTACGATTTCCAGTATG
GAACCCGAAGATTTTGCAACTTATTATTGTTTCCAGGGGAGCGTGTACCCATTCACTTTCGGGCAGGGGACAAAATT
GGAGATAAAGGGAAGTACTGGTTCTGGGTCTAAACCCGGTTCCGGCGAAGGTAGTACTAAAGGACAGGTCACATTGA
AGGAATCTGGCCCCGGCCTTGTTCAGCCAGGACAGACCCTTAGGCTCACCTGTGCCTTCAGTGGTTTTTCTCTTAGC
ACTAGCGGTATGGGGGTCGGCTGGATTCGGCAGCCTCCCGGCAAAGGTCTTGAGTGGTTGGCTCACATTTGGTGGGA
CGACGACAAACGGTATAATCCTGCCTTGAAAAGTCGGCTGACCATTAGTAAGGATACCTCAAAAAATCAAGTGTACT
TGCAAATGAATAGCCTTGACGCCGAGGATACGGCTGTATATTATTGCGCGCGGATGGAACTCTGGTCTTACTACTTT
GATTATTGGGGGCAGGGGACTCTCGTCACGGTGTCGACTGGCGGTGGAGGGTCCGGCGGTGGTGGATCATTCCTAAA
CTCATTATTCAACCAAGAAGTTCAAATTCCCTTGACCGAAAGTTACTGTGGCCCATGTCCTAAAAACTGGATATGTT
ACAAAAATAACTGCTACCAATTTTTTGATGAGAGTAAAAACTGGTATGAGAGCCAGGCTTCTTGTATGTCTCAAAAT
GCCAGCCTTCTGAAAGTATACAGCAAAGAGGACCAGGATTTACTTAAACTGGTGAAGTCATATCATTGGATGGGACT
AGTACACATTCCAACAAATGGATCTTGGCAGTGGGAAGATGGCTCCATTCTCTCACCCAACCTACTAACAATAATTG
AAATGCAGAAGGGAGACTGTGCACTCTATGCCTCGAGCTTTAAAGGCTATATAGAAAACTGTTCAACTCCAAATACG
TACATCTGCATGCAAAGGACTGTGCGTACGGTGGCTGCACCATCTGTCTTCATCTTCCCGCCATCTGATGAGCAGTT
GAAATCTGGAACTGCCTCTGTTGTGTGCCTGCTGAATAACTTCTATCCCAGAGAGGCCAAAGTACAGTGGAAGGTGG
ATAACGCCCTCCAATCGGGTAACTCCCAGGAGAGTGTCACAGAGCAGGACAGCAAGGACAGCACCTACAGCCTCAGC
AGCACCCTGACGCTGAGCAAAGCAGACTACGAGAAACACAAAGTCTACGCCTGCGAAGTCACCCATCAGGGCCTGAG
CTCGCCCGTCACAAAGAGCTTCAACAGGGGAGAGTGTGGAGGCGACAAAACTCACACATGCCCACCGTGCCCAGCAC
CTGAAGCCGCGGGGGGACCGTCAGTCTTCCTCTTCCCCCCAAAACCCAAGGACACCCTCATGATCTCCCGGACCCCT
GAGGTCACATGCGTGGTGGTGGACGTGAGCCACGAAGACCCTGAGGTCAAGTTCAACTGGTACGTGGACGGCGTGGA
GGTGCATAATGCCAAGACAAAGCCGCGGGAGGAGCAGTACGCCAGCACGTACCGTGTGGTCAGCGTCCTCACCGTCC
TGCACCAGGACTGGCTGAATGGCAAGGAGTACAAGTGCGCGGTCTCCAACAAAGCCCTCCCAGCCCCCATCGAGAAA
ACCATCTCCAAAGCCAAAGGGCAGCCCCGAGAACCACAGGTGTACACCCTGCCCCCATGTCGGGATGAGCTGACCAA
GAACCAGGTCAGCCTGTGGTGCCTGGTCAAAGGCTTCTATCCCAGCGACATCGCCGTGGAGTGGGAGAGCAATGGGC
AGCCGGAGAACAACTACAAGACCACGCCTCCCGTGCTGGACTCCGACGGCTCCTTCTTCCTCTATAGCAAGCTCACC
GTGGACAAGAGCAGGTGGCAGCAGGGGAACGTCTTCTCATGCTCCGTGATGCATGAGGCTCTGCACAACCACTACAC
GCAGAAGAGCCTCTCCCTGTCTCCGGGTGGCGGTGGAGGGTCCGGCGGTGGTGGATCCGAGGTGCAGCTGTTGGAGT
CTGGGGGAGGCTTGGTACAGCCTGGGGGGTCCCTGAGACTCTCCTGTGCAGCCTCTGGATTCTCCTTCAGTAGCGGG
TACGACATGTGCTGGGTCCGCCAGGCTCCAGGGAAGTGCCTGGAGTGGATCGCATGCATTGCTGCTGGTAGTGCTGG
TATCACTTACGACGCGAACTGGGCGAAAGGCCGGTTCACCATCTCCAGAGACAATTCCAAGAACACGCTGTATCTGC
AAATGAACAGCCTGAGAGCCGAGGACACGGCCGTATATTACTGTGCGAGATCGGCGTTTTCGTTCGACTACGCCATG
GACCTCTGGGGCCAGGGAACCCTGGTCACCGTCTCGTCTGGTGGAGGCGGTTCAGGCGGAGGTGGAAGTGGTGGTGG
CGGCTCTGGAGGCGGCGGATCTGACATCCAGATGACCCAGTCTCCTTCCACCCTGTCTGCATCTGTAGGAGACAGAG
TCACCATCACTTGCCAGGCCAGTCAGAGCATTAGTTCCCACTTAAACTGGTATCAGCAGAAACCAGGGAAAGCCCCT
AAGCTCCTGATCTATAAGGCATCCACTCTGGCATCTGGGGTCCCATCAAGGTTCAGCGGCAGTGGATCTGGGACAGA
ATTTACTCTCACCATCAGCAGCCTGCAGCCTGATGATTTTGCAACTTATTACTGCCAACAGGGTTATAGTTGGGGTA
ATGTTGATAATGTTTTCGGCTGCGGGACCAAGGTGGAGATCAAATAG
>Sequence ID 173: SI-49PM1 Chain A Amino Acid Sequence
FLNSLFNQEVQIPLTESYCGPCPKNWICYKNNCYQFFDESKNWYESQASCMSQNASLLKVYSKEDQDLLKLVKSYHW
MGLVHIPTNGSWQWEDGSILSPNLLTIIEMQKGDCALYASSFKGYIENCSTPNTYICMQRTVGGGGSGGGGSGGGGS
GGGGSFLNSLFNQEVQIPLTESYCGPCPKNWICYKNNCYQFFDESKNWYESQASCMSQNASLLKVYSKEDQDLLKLV
KSYHWMGLVHIPTNGSWQWEDGSILSPNLLTIIEMQKGDCALYASSFKGYIENCSTPNTYICMQRTVVDGGGGSGGG
GSEVQLVESGGGLVQPGGSLRLSCAASGFTISTNAMSWVRQAPGKGLEWIGVITGRDITYYASWAKGRFTISRDNSK
NTLYLQMNSLRAEDTAVYYCARDGGSSAITSNNIWGQGTLVTVSSASTKGPSVFPLAPSSKSTSGGTAALGCLVKDY
FPEPVTVSWNSGALTSGVHTFPAVLQSSGLYSLSSVVTVPSSSLGTQTYICNVNHKPSNTKVDKRVEPKSCDKTHTC
PPCPAPEAAGGPSVFLFPPKPKDTLMISRTPEVTCVVVDVSHEDPEVKENWYVDGVEVHNAKTKPREEQYASTYRVV
SVLTVLHQDWLNGKEYKCAVSNKALPAPIEKTISKAKGQPREPQVCTLPPSRDELTKNQVSLSCAVKGFYPSDIAVE
WESNGQPENNYKTTPPVLDSDGSFFLVSKLTVDKSRWQQGNVFSCSVMHEALHNHYTQKSLSLSPGGGGGSGGGGSR
SLVESGGGLVQPGGSLRLSCTASGFTISSYHMQWVRQAPGKCLEYIGTISSGGNVYYASSARGRFTISRPSSKNTVD
LQMNSLRAEDTAVYYCARDSGYSDPMWGQGTLVTVSSGGGGSGGGGSGGGGSGGGGSDVVMTQSPSSVSASVGDRVT
ITCQASQNIRTYLSWYQQKPGKAPKLLIYAAANLASGVPSRFSGSGSGTDFTLTISDLEPGDAATYYCQSTYLGTDY
VGGAFGCGTKVEIK
>Sequence ID 174: SI-49PM1 Chain A Nucleotide Sequence
TTTCTTAATTCCCTTTTCAACCAAGAGGTTCAGATCCCCTTGACTGAAAGCTATTGCGGCCCTTGTCCGAAAAACTG
GATATGTTACAAGAATAATTGTTACCAATTCTTCGACGAAAGCAAGAACTGGTATGAGAGTCAGGCGTCTTGTATGA
GTCAGAATGCCAGCCTGCTTAAGGTTTATTCAAAAGAAGACCAGGATCTGCTTAAGTTGGTAAAGAGCTACCACTGG
ATGGGGCTGGTACATATCCCAACGAATGGGTCATGGCAGTGGGAGGACGGTTCTATTCTGAGTCCAAATCTCCTGAC
GATCATCGAAATGCAGAAAGGGGACTGTGCCCTGTATGCATCATCCTTCAAGGGGTACATCGAGAACTGCAGTACCC
CAAATACCTACATTTGTATGCAAAGAACGGTTGGAGGCGGTGGCTCAGGCGGAGGCGGCTCAGGAGGTGGCGGTTCA
GGAGGCGGCGGATCTTTCCTAAACTCATTATTCAACCAAGAAGTTCAAATTCCCTTGACCGAAAGTTACTGTGGCCC
ATGTCCTAAAAACTGGATATGTTACAAAAATAACTGCTACCAATTTTTTGATGAGAGTAAAAACTGGTATGAGAGCC
AGGCTTCTTGTATGTCTCAAAATGCCAGCCTTCTGAAAGTATACAGCAAAGAGGACCAGGATTTACTTAAACTGGTG
AAGTCATATCATTGGATGGGACTAGTACACATTCCAACAAATGGATCTTGGCAGTGGGAAGATGGCTCCATTCTCTC
ACCCAACCTACTAACAATAATTGAAATGCAGAAGGGAGACTGTGCACTCTATGCCTCGAGCTTTAAAGGCTATATAG
AAAACTGTTCAACTCCAAATACGTACATCTGCATGCAAAGGACTGTGGTCGACGGCGGTGGAGGGTCCGGCGGTGGT
GGATCAGAGGTGCAGCTGGTGGAGTCTGGGGGAGGCTTGGTCCAGCCTGGGGGGTCCCTGAGACTCTCCTGTGCAGC
CTCTGGATTCACCATCAGTACCAATGCAATGAGCTGGGTCCGCCAGGCTCCAGGGAAGGGGCTGGAGTGGATCGGAG
TCATTACTGGTCGTGATATCACATACTACGCGAGCTGGGCGAAAGGCAGATTCACCATCTCCAGAGACAATTCCAAG
AACACGCTGTATCTTCAAATGAACAGCCTGAGAGCCGAGGACACGGCTGTGTATTACTGTGCGAGAGACGGTGGTTC
TTCTGCTATTACTAGTAACAACATTTGGGGCCAGGGAACCCTGGTCACCGTGTCCTCAGCTAGCACCAAGGGCCCAT
CGGTCTTCCCCCTGGCACCCTCCTCCAAGAGCACCTCTGGGGGCACAGCGGCCCTGGGCTGCCTGGTCAAGGACTAC
TTCCCCGAACCGGTGACGGTGTCGTGGAACTCAGGCGCCCTGACCAGCGGCGTGCACACCTTCCCGGCTGTCCTACA
GTCCTCAGGACTCTACTCCCTCAGCAGCGTGGTGACCGTGCCCTCCAGCAGCTTGGGCACCCAGACCTACATCTGCA
ACGTGAATCACAAGCCCAGCAACACCAAGGTGGACAAGAGAGTTGAGCCCAAATCTTGTGACAAAACTCACACATGC
CCACCGTGCCCAGCACCTGAAGCCGCGGGGGGACCGTCAGTCTTCCTCTTCCCCCCAAAACCCAAGGACACCCTCAT
GATCTCCCGGACCCCTGAGGTCACATGCGTGGTGGTGGACGTGAGCCACGAAGACCCTGAGGTCAAGTTCAACTGGT
ACGTGGACGGCGTGGAGGTGCATAATGCCAAGACAAAGCCGCGGGAGGAGCAGTACGCCAGCACGTACCGTGTGGTC
AGCGTCCTCACCGTCCTGCACCAGGACTGGCTGAATGGCAAGGAGTACAAGTGCGCGGTCTCCAACAAAGCCCTCCC
AGCCCCCATCGAGAAAACCATCTCCAAAGCCAAAGGGCAGCCCCGAGAACCACAGGTGTGTACCCTGCCCCCATCCC
GGGATGAGCTGACCAAGAACCAGGTCAGCCTGTCCTGCGCCGTCAAAGGCTTCTATCCCAGCGACATCGCCGTGGAG
TGGGAGAGCAATGGGCAGCCGGAGAACAACTACAAGACCACGCCTCCCGTGCTGGACTCCGACGGCTCCTTCTTCCT
CGTGAGCAAGCTCACCGTGGACAAGAGCAGGTGGCAGCAGGGGAACGTCTTCTCATGCTCCGTGATGCATGAGGCTC
TGCACAACCACTACACGCAGAAGAGCCTCTCCCTGTCTCCGGGTGGCGGTGGAGGGTCCGGCGGTGGTGGATCCCGG
TCGCTGGTGGAGTCTGGGGGAGGCTTGGTCCAGCCTGGGGGGTCCCTGAGACTCTCCTGTACTGCCTCTGGATTCAC
CATCAGTAGCTACCACATGCAGTGGGTCCGGCAGGCACCTGGGAAGTGCCTGGAGTACATCGGAACCATTAGTAGTG
GTGGTAATGTATACTACGCAAGCTCCGCTAGAGGCAGATTCACCATCTCCAGACCCTCGTCCAAGAACACGGTGGAT
CTTCAAATGAACAGCCTGAGAGCCGAGGACACGGCTGTGTATTACTGTGCGAGAGACTCTGGTTATAGTGATCCTAT
GTGGGGCCAGGGAACCCTGGTCACCGTCTCTTCAGGCGGTGGCGGTAGTGGGGGAGGCGGTTCTGGCGGCGGAGGGT
CCGGCGGTGGAGGATCAGACGTTGTGATGACCCAGTCTCCATCTTCCGTGTCTGCATCTGTAGGAGACAGAGTCACC
ATCACCTGTCAGGCCAGTCAGAACATTAGGACTTACTTATCCTGGTATCAGCAGAAACCAGGGAAAGCCCCTAAGCT
CCTGATCTATGCTGCAGCCAATCTGGCATCTGGGGTCCCATCAAGGTTCAGCGGCAGTGGATCTGGGACAGATTTCA
CTCTCACCATCAGCGACTTGGAACCTGGCGATGCTGCAACTTACTATTGTCAGTCTACCTATCTTGGTACTGATTAT
GTTGGCGGTGCTTTCGGCTGTGGGACCAAGGTGGAGATCAAATGA
>Sequence ID 175: SI-49PM1 Chain B Amino Acid Sequence
ENVLTQSPASLSASPGERVTITCSASSSVSYMHWYQQKPGQAPKLWIYDTSKLASGVPSRFSGSGSGNDHTLTISSM
EPEDFATYYCFQGSVYPFTFGQGTKVTVLGGGGSGGGGSGGGGSGGGGSQVTLKESGPGLVQPGQTLSLTCAFSGFS
LSTSGMGVGWIRQPPGKGLEWLAHIWWDDDKRYNPALKSRLTISKDTSKNQVYLQMNSLDAEDTAVYYCARMELWSY
YFDYWGQGTLVTVSSGGGGSGGGGSDVVMTQSPSTLSASVGDRVTINCQASESISSWLAWYQQKPGKAPKLLIYEAS
KLASGVPSRFSGSGSGTEFTLTISSLQPDDFATYYCQGYFYFISRTYVNSFGGGTKVEIKRTVAAPSVFIFPPSDEQ
LKSGTASVVCLLNNFYPREAKVQWKVDNALQSGNSQESVTEQDSKDSTYSLSSTLTLSKADYEKHKVYACEVTHQGL
SSPVTKSFNRGECGGDKTHTCPPCPAPEAAGGPSVFLFPPKPKDTLMISRTPEVTCVVVDVSHEDPEVKFNWYVDGV
EVHNAKTKPREEQYNSTYRVVSVLTVLHQDWLNGKEYKCAVSNKALPAPIEKTISKAKGQPREPQVYTLPPSRDELT
KNQVSLWCLVKGFYPSDIAVEWESNGQPENNYKTTPPVLDSDGSFFLYSKLTVDKSRWQQGNVFSCSVMHEALHNRF
TQKSLSLSPGGGGGSGGGGSDIQMTQSPSTLSASVGDRVTITCQASQSISSHLNWYQQKPGKAPKLLIYKASTLASG
VPSRFSGSGSGTEFTLTISSLQPDDFATYYCQQGYSWGNVDNVFGGGTKVTVLGGGGSGGGGSGGGGSGGGGSEVQL
LESGGGLVQPGGSLSLSCAASGFSFSSGYDMCWVRQAPGKGLEWIACIAAGSAGITYDANWAKGRFTISRDNSKNTL
YLQMNSLRAEDTAVYYCARSAFSFDYAMDLWGQGTLVTVSS
>Sequence ID 176: SI-49PM1 Chain B Nucleotide Sequence
GAAAATGTATTGACACAGAGCCCCGCCTCCCTCAGTGCCTCACCTGGGGAAAGGGTAACTATCACTTGCTCTGCATC
AAGCAGCGTCTCATACATGCATTGGTATCAACAAAAGCCTGGACAGGCCCCCAAGCTCTGGATATACGATACGAGCA
AGCTGGCTTCCGGCGTACCTAGCCGCTTCAGTGGTTCCGGCTCAGGCAACGATCACACCCTTACGATTTCCAGTATG
GAACCCGAAGATTTTGCAACTTATTATTGTTTCCAGGGGAGCGTGTACCCATTCACTTTCGGGCAGGGGACAAAAGT
GACCGTCCTAGGCGGTGGCGGTAGTGGGGGAGGCGGTTCTGGCGGCGGAGGGTCCGGCGGTGGAGGATCACAGGTCA
CATTGAAGGAATCTGGCCCCGGCCTTGTTCAGCCAGGACAGACCCTTAGCCTCACCTGTGCCTTCAGTGGTTTTTCT
CTTAGCACTAGCGGTATGGGGGTCGGCTGGATTCGGCAGCCTCCCGGCAAAGGTCTTGAGTGGTTGGCTCACATTTG
GTGGGACGACGACAAACGGTATAATCCTGCCTTGAAAAGTCGGCTGACCATTAGTAAGGATACCTCAAAAAATCAAG
TGTACTTGCAAATGAATAGCCTTGACGCCGAGGATACGGCTGTATATTATTGCGCGCGGATGGAACTCTGGTCTTAC
TACTTTGATTATTGGGGGCAGGGGACTCTCGTCACGGTCTCGAGCGGCGGTGGAGGGTCCGGCGGTGGTGGATCAGA
CGTCGTGATGACCCAGTCTCCTTCCACCCTGTCTGCATCTGTAGGAGACAGAGTCACCATCAATTGCCAAGCCAGTG
AGAGCATTAGCAGTTGGTTAGCCTGGTATCAGCAGAAACCAGGGAAAGCCCCTAAGCTCCTGATCTATGAAGCATCC
AAACTGGCATCTGGGGTCCCATCAAGGTTCAGCGGCAGTGGATCTGGGACAGAATTCACTCTCACCATCAGCAGCCT
GCAGCCTGATGATTTTGCAACTTATTACTGCCAAGGCTATTTTTATTTTATTAGTCGTACTTATGTAAATTCTTTCG
GCGGAGGGACCAAGGTGGAGATCAAACGTACGGTGGCTGCACCATCTGTCTTCATCTTCCCGCCATCTGATGAGCAG
TTGAAATCTGGAACTGCCTCTGTTGTGTGCCTGCTGAATAACTTCTATCCCAGAGAGGCCAAAGTACAGTGGAAGGT
GGATAACGCCCTCCAATCGGGTAACTCCCAGGAGAGTGTCACAGAGCAGGACAGCAAGGACAGCACCTACAGCCTCA
GCAGCACCCTGACGCTGAGCAAAGCAGACTACGAGAAACACAAAGTCTACGCCTGCGAAGTCACCCATCAGGGCCTG
AGCTCGCCCGTCACAAAGAGCTTCAACAGGGGAGAGTGTGGAGGCGACAAAACTCACACATGCCCACCGTGCCCAGC
ACCTGAAGCCGCGGGGGGACCGTCAGTCTTCCTCTTCCCCCCAAAACCCAAGGACACCCTCATGATCTCCCGGACCC
CTGAGGTCACATGCGTGGTGGTGGACGTGAGCCACGAAGACCCTGAGGTCAAGTTCAACTGGTACGTGGACGGCGTG
GAGGTGCATAATGCCAAGACAAAGCCGCGGGAGGAGCAGTACAACAGCACGTACCGTGTGGTCAGCGTCCTCACCGT
CCTGCACCAGGACTGGCTGAATGGCAAGGAGTACAAGTGCGCGGTCTCCAACAAAGCCCTCCCAGCCCCCATCGAGA
AAACCATCTCCAAAGCCAAAGGGCAGCCCCGAGAACCACAGGTGTACACCCTGCCCCCAAGCCGGGATGAGCTGACC
AAGAACCAGGTCAGCCTGTGGTGCCTGGTCAAAGGCTTCTATCCCAGCGACATCGCCGTGGAGTGGGAGAGCAATGG
GCAGCCGGAGAACAACTACAAGACCACGCCTCCCGTGCTGGACTCCGACGGCTCCTTCTTCCTCTATAGCAAGCTCA
CCGTGGACAAGAGCAGGTGGCAGCAGGGGAACGTCTTCTCATGCTCCGTGATGCATGAGGCTCTGCACAACAGATTC
ACGCAGAAGAGCCTCTCCCTGTCTCCGGGTGGCGGTGGAGGGTCCGGCGGTGGTGGATCCGACATTCAGATGACACA
GTCACCGTCTACGCTCTCAGCCTCAGTAGGCGATAGGGTGACTATCACCTGCCAAGCCTCCCAATCTATAAGTTCAC
ACCTCAACTGGTATCAACAGAAACCCGGTAAAGCACCGAAGCTGCTCATCTACAAGGCATCAACTCTTGCCTCAGGT
GTGCCTAGTCGCTTCTCCGGGAGCGGCTCCGGTACTGAGTTTACTTTGACGATATCTTCCCTCCAACCCGACGACTT
CGCCACATACTATTGTCAGCAGGGTTATAGTTGGGGAAATGTTGACAATGTGTTTGGAGGGGGAACGAAAGTGACTG
TGTTGGGAGGGGGAGGAAGTGGCGGCGGCGGAAGCGGAGGTGGTGGCTCCGGCGGGGGTGGAAGCGAAGTGCAATTG
CTCGAAAGTGGTGGCGGACTTGTGCAACCTGGTGGAAGCCTCTCACTCTCTTGCGCGGCGAGTGGTTTTAGCTTCAG
TAGCGGCTACGATATGTGCTGGGTAAGACAGGCTCCTGGTAAAGGCCTTGAGTGGATTGCGTGTATCGCCGCCGGGT
CTGCTGGTATAACATACGATGCAAACTGGGCGAAAGGGCGCTTCACAATCTCCAGGGACAACTCAAAAAATACATTG
TACCTCCAGATGAATAGCCTGAGAGCCGAAGACACCGCAGTCTACTATTGCGCAAGGTCAGCATTTAGCTTCGATTA
TGCAATGGATCTTTGGGGCCAGGGGACGCTCGTCACCGTCTCATCTTGA
>Sequence ID 177: SI-49P9 Chain A Amino Acid
EIVMTQSPSTLSASVGDRVIITCQASESISSWLAWYQQKPGKAPKLLIYEASKLASGVPSRFSGSGSGAEFTLTISS
LQPDDFATYYCQGYFYFISRTYVNSFGCGTKLTVLGSTGSGSKPGSGEGSTKGEVQLVESGGGLVQPGGSLRLSCTA
SGFTISTNAMSWVRQAPGKCLEWVGVITGRDITYYASWAKGRFTISRDTSKNTVYLQMNSLRAEDTAVYYCARDGGS
SAITSNNIWGQGTLVTVSTGGGGSGGGGSFLNSLFNQEVQIPLTESYCGPCPKNWICYKNNCYQFFDESKNWYESQA
SCMSQNASLLKVYSKEDQDLLKLVKSYHWMGLVHIPTNGSWQWEDGSILSPNLLTIIEMQKGDCALYASSFKGYIEN
CSTPNTYICMQRTVASTKGPSVFPLAPSSKSTSGGTAALGCLVKDYFPEPVTVSWNSGALTSGVHTFPAVLQSSGLY
SLSSVVTVPSSSLGTQTYICNVNHKPSNTKVDKRVEPKSCDKTHTCPPCPAPEAAGGPSVFLFPPKPKDTLMISRTP
EVTCVVVDVSHEDPEVKFNWYVDGVEVHNAKTKPREEQYASTYRVVSVLTVLHQDWLNGKEYKCAVSNKALPAPIEK
TISKAKGQPREPQVCTLPPSRDELTKNQVSLSCAVKGFYPSDIAVEWESNGQPENNYKTTPPVLDSDGSFFLVSKLT
VDKSRWQQGNVFSCSVMHEALHNHYTQKSLSLSPGGGGGSGGGGSREGPELSPDDPAGLLDLRQGMFAQLVAQNVLL
IDGPLSWYSDPGLAGVSLTGGLSYKEDTKELVVAKAGVYYVFFQLELRRVVAGEGSGSVSLALHLQPLRSAAGAAAL
ALTVDLPPASSEARNSAFGFQGRLLHLSAGQRLGVHLHTEARARHAWQLTQGATVLGLFRVTPEIPAGLGSTGSGSK
PGSGEGSTKGREGPELSPDDPAGLLDLRQGMFAQLVAQNVLLIDGPLSWYSDPGLAGVSLTGGLSYKEDTKELVVAK
AGVYYVFFQLELRRVVAGEGSGSVSLALHLQPLRSAAGAAALALTVDLPPASSEARNSAFGFQGRLLHLSAGQRLGV
HLHTEARARHAWQLTQGATVLGLFRVTPEIPAGLGGGGSGGGGSREGPELSPDDPAGLLDLRQGMFAQLVAQNVLLI
DGPLSWYSDPGLAGVSLTGGLSYKEDTKELVVAKAGVYYVFFQLELRRVVAGEGSGSVSLALHLQPLRSAAGAAALA
LTVDLPPASSEARNSAFGFQGRLLHLSAGQRLGVHLHTEARARHAWQLTQGATVLGLFRVTPEIPAGL
>Sequence ID 178: SI-49P9 Chain A Nucleotide Sequence
GAGATCGTGATGACACAATCTCCATCTACGCTCTCCGCCTCAGTGGGCGATAGAGTAATTATTACTTGTCAAGCCTC
AGAGAGCATTTCATCATGGCTCGCCTGGTATCAGCAAAAGCCTGGGAAGGCCCCCAAACTTCTCATCTATGAAGCAT
CAAAGCTGGCCTCTGGGGTTCCGTCTCGCTTCTCCGGGTCCGGCAGTGGTGCAGAGTTTACGTTGACTATATCTTCT
TTGCAACCTGACGATTTCGCAACATATTATTGCCAGGGATACTTTTATTTTATTTCCCGAACATATGTTAACTCTTT
TGGGTGCGGGACCAAACTCACTGTGCTGGGGTCTACCGGTAGTGGTTCTAAGCCTGGTTCAGGCGAAGGCAGTACGA
AAGGGGAAGTGCAACTGGTCGAAAGCGGTGGAGGGCTTGTTCAACCTGGAGGAAGCCTCCGCTTGTCCTGCACGGCT
AGCGGCTTTACAATAAGTACGAACGCCATGAGCTGGGTCCGGCAGGCTCCAGGTAAGTGTCTCGAATGGGTGGGGGT
CATAACAGGCAGGGACATTACCTACTACGCCAGTTGGGCCAAGGGTCGATTTACCATTTCTAGAGATACATCCAAGA
ACACGGTGTACCTCCAGATGAATTCTCTTAGGGCGGAAGACACAGCAGTATACTACTGCGCGCGAGATGGCGGGAGC
AGTGCGATCACATCCAACAACATCTGGGGTCAGGGCACTCTTGTCACGGTGTCGACTGGCGGTGGAGGGTCCGGCGG
TGGTGGATCATTTCTTAATTCCCTTTTCAACCAAGAGGTTCAGATCCCCTTGACTGAAAGCTATTGCGGCCCTTGTC
CGAAAAACTGGATATGTTACAAGAATAATTGTTACCAATTCTTCGACGAAAGCAAGAACTGGTATGAGAGTCAGGCG
TCTTGTATGAGTCAGAATGCCAGCCTGCTTAAGGTTTATTCAAAAGAAGACCAGGATCTGCTTAAGTTGGTAAAGAG
CTACCACTGGATGGGGCTGGTACATATCCCAACGAATGGGTCATGGCAGTGGGAGGACGGTTCTATTCTGAGTCCAA
ATCTCCTGACGATCATCGAAATGCAGAAAGGGGACTGTGCCCTGTATGCATCATCCTTCAAGGGGTACATCGAGAAC
TGCAGTACCCCAAATACCTACATTTGTATGCAAAGAACGGTTGCTAGCACCAAGGGCCCATCGGTCTTCCCCCTGGC
ACCCTCCTCCAAGAGCACCTCTGGGGGCACAGCGGCCCTGGGCTGCCTGGTCAAGGACTACTTCCCCGAACCGGTGA
CGGTGTCGTGGAACTCAGGCGCCCTGACCAGCGGCGTGCACACCTTCCCGGCTGTCCTACAGTCCTCAGGACTCTAC
TCCCTCAGCAGCGTGGTGACCGTGCCCTCCAGCAGCTTGGGCACCCAGACCTACATCTGCAACGTGAATCACAAGCC
CAGCAACACCAAGGTGGACAAGAGAGTTGAGCCCAAATCTTGTGACAAAACTCACACATGCCCACCGTGCCCAGCAC
CTGAAGCCGCGGGGGGACCGTCAGTCTTCCTCTTCCCCCCAAAACCCAAGGACACCCTCATGATCTCCCGGACCCCT
GAGGTCACATGCGTGGTGGTGGACGTGAGCCACGAAGACCCTGAGGTCAAGTTCAACTGGTACGTGGACGGCGTGGA
GGTGCATAATGCCAAGACAAAGCCGCGGGAGGAGCAGTACGCCAGCACGTACCGTGTGGTCAGCGTCCTCACCGTCC
TGCACCAGGACTGGCTGAATGGCAAGGAGTACAAGTGCGCGGTCTCCAACAAAGCCCTCCCAGCCCCCATCGAGAAA
ACCATCTCCAAAGCCAAAGGGCAGCCCCGAGAACCACAGGTGTGTACCCTGCCCCCATCCCGGGATGAGCTGACCAA
GAACCAGGTCAGCCTGTCCTGCGCCGTCAAAGGCTTCTATCCCAGCGACATCGCCGTGGAGTGGGAGAGCAATGGGC
AGCCGGAGAACAACTACAAGACCACGCCTCCCGTGCTGGACTCCGACGGCTCCTTCTTCCTCGTGAGCAAGCTCACC
GTGGACAAGAGCAGGTGGCAGCAGGGGAACGTCTTCTCATGCTCCGTGATGCATGAGGCTCTGCACAACCACTACAC
GCAGAAGAGCCTCTCCCTGTCTCCGGGTGGCGGTGGAGGGTCCGGCGGTGGTGGATCCCGAGAGGGCCCCGAGCTGT
CTCCTGATGACCCAGCAGGCCTCTTGGACTTGCGGCAGGGTATGTTCGCTCAACTTGTGGCTCAGAATGTTCTGCTC
ATTGATGGACCACTCTCTTGGTATAGTGACCCCGGTCTGGCCGGGGTGAGTCTGACCGGCGGGCTCTCTTATAAAGA
GGATACTAAGGAACTGGTCGTAGCAAAAGCGGGCGTTTATTACGTTTTTTTTCAGCTGGAGCTCAGGCGCGTGGTGG
CCGGCGAGGGCAGTGGCTCTGTGTCCCTGGCCCTGCACTTACAGCCCTTGAGAAGCGCTGCAGGTGCTGCCGCACTG
GCTTTAACTGTTGACCTCCCTCCGGCCTCTTCTGAAGCTAGAAACAGCGCTTTCGGCTTCCAAGGGCGCCTGCTGCA
CCTGAGCGCAGGCCAGCGCTTAGGTGTGCACCTTCATACAGAGGCCAGGGCCCGACACGCTTGGCAGCTCACACAGG
GTGCCACGGTTCTCGGACTTTTCCGCGTTACTCCCGAGATCCCCGCTGGCCTCGGAAGTACTGGTTCTGGGTCTAAA
CCCGGTTCCGGCGAAGGTAGTACTAAAGGACGAGAAGGGCCAGAGTTAAGTCCAGATGACCCTGCTGGGCTTTTGGA
CCTGCGGCAGGGCATGTTCGCTCAACTGGTGGCTCAGAACGTGCTGCTGATCGATGGCCCCCTGAGTTGGTACAGCG
ATCCCGGGCTGGCAGGCGTGTCACTTACAGGGGGCCTCTCTTACAAGGAAGACACCAAGGAGTTAGTGGTCGCTAAG
GCTGGCGTGTATTACGTGTTCTTCCAACTGGAGCTGAGAAGGGTTGTGGCAGGAGAGGGTAGCGGCAGCGTGTCTTT
AGCCCTTCACTTGCAGCCCCTGAGGTCTGCTGCAGGTGCAGCCGCTCTCGCGCTCACCGTGGATCTCCCCCCAGCCT
CATCTGAAGCTAGGAACAGTGCATTTGGCTTTCAGGGACGCTTGCTGCACCTCTCCGCTGGACAGAGGCTGGGCGTG
CACCTTCACACAGAGGCCCGTGCCAGGCATGCATGGCAGCTCACTCAGGGGGCAACAGTGCTGGGTCTCTTCCGCGT
GACTCCTGAAATACCAGCTGGACTTGGCGGTGGAGGCAGCGGCGGAGGAGGATCTCGTGAGGGGCCAGAACTGTCCC
CCGATGACCCAGCCGGACTGCTCGATCTCAGACAGGGCATGTTCGCTCAGCTTGTAGCCCAAAATGTCCTCCTGATT
GACGGCCCTTTGAGCTGGTATAGTGATCCCGGCTTGGCCGGGGTATCTCTGACCGGAGGCCTCTCCTACAAGGAAGA
CACCAAAGAGCTGGTGGTGGCAAAAGCGGGGGTGTATTATGTGTTCTTTCAGCTCGAGCTGCGGAGAGTTGTGGCCG
GGGAAGGGTCTGGGAGCGTATCTCTTGCACTTCACCTGCAGCCCCTGCGCAGCGCCGCTGGAGCCGCCGCCCTTGCT
CTTACTGTGGATCTGCCTCCTGCTTCCTCAGAAGCACGCAACAGCGCCTTCGGCTTTCAAGGACGTCTCCTGCACTT
GTCCGCAGGACAGAGGTTGGGCGTCCATTTACACACTGAGGCACGGGCACGGCACGCTTGGCAGCTTACCCAGGGAG
CCACCGTGCTGGGACTCTTTAGAGTGACACCCGAGATCCCCGCTGGCTTGTAA
>Sequence ID 179: SI-49P9 Chain B Amino Acid Sequence
ENVLTQSPASLSASPGERVTITCSASSSVSYMHWYQQKPGQAPKLWIYDTSKLASGVPSRFSGSGSGNDHTLTISSM
EPEDFATYYCFQGSVYPFTFGQGTKLEIKGSTGSGSKPGSGEGSTKGQVTLKESGPGLVQPGQTLRLTCAFSGFSLS
TSGMGVGWIRQPPGKGLEWLAHIWWDDDKRYNPALKSRLTISKDTSKNQVYLQMNSLDAEDTAVYYCARMELWSYYF
DYWGQGTLVTVSTGGGGSGGGGSFLNSLFNQEVQIPLTESYCGPCPKNWICYKNNCYQFFDESKNWYESQASCMSQN
ASLLKVYSKEDQDLLKLVKSYHWMGLVHIPTNGSWQWEDGSILSPNLLTIIEMQKGDCALYASSFKGYIENCSTPNT
YICMQRTVRTVAAPSVFIFPPSDEQLKSGTASVVCLLNNFYPREAKVQWKVDNALQSGNSQESVTEQDSKDSTYSLS
STLTLSKADYEKHKVYACEVTHQGLSSPVTKSFNRGECGGDKTHTCPPCPAPEAAGGPSVFLFPPKPKDTLMISRTP
EVTCVVVDVSHEDPEVKFNWYVDGVEVHNAKTKPREEQYASTYRVVSVLTVLHQDWLNGKEYKCAVSNKALPAPIEK
TISKAKGQPREPQVYTLPPCRDELTKNQVSLWCLVKGFYPSDIAVEWESNGQPENNYKTTPPVLDSDGSFFLYSKLT
VDKSRWQQGNVFSCSVMHEALHNHYTQKSLSLSPGGGGGSGGGGSEVQLLESGGGLVQPGGSLRLSCAASGFSFSSG
YDMCWVRQAPGKCLEWIACIAAGSAGITYDANWAKGRFTISRDNSKNTLYLQMNSLRAEDTAVYYCARSAFSFDYAM
DLWGQGTLVTVSSGGGGSGGGGSGGGGSGGGGSDIQMTQSPSTLSASVGDRVTITCQASQSISSHLNWYQQKPGKAP
KLLIYKASTLASGVPSRFSGSGSGTEFTLTISSLQPDDFATYYCQQGYSWGNVDNVFGCGTKVEIK
>Sequence ID 180: SI-49P9 Chain B Nucleotide Sequence
GAAAATGTATTGACACAGAGCCCCGCCTCCCTCAGTGCCTCACCTGGGGAAAGGGTAACTATCACTTGCTCTGCATC
AAGCAGCGTCTCATACATGCATTGGTATCAACAAAAGCCTGGACAGGCCCCCAAGCTCTGGATATACGATACGAGCA
AGCTGGCTTCCGGCGTACCTAGCCGCTTCAGTGGTTCCGGCTCAGGCAACGATCACACCCTTACGATTTCCAGTATG
GAACCCGAAGATTTTGCAACTTATTATTGTTTCCAGGGGAGCGTGTACCCATTCACTTTCGGGCAGGGGACAAAATT
GGAGATAAAGGGAAGTACTGGTTCTGGGTCTAAACCCGGTTCCGGCGAAGGTAGTACTAAAGGACAGGTCACATTGA
AGGAATCTGGCCCCGGCCTTGTTCAGCCAGGACAGACCCTTAGGCTCACCTGTGCCTTCAGTGGTTTTTCTCTTAGC
ACTAGCGGTATGGGGGTCGGCTGGATTCGGCAGCCTCCCGGCAAAGGTCTTGAGTGGTTGGCTCACATTTGGTGGGA
CGACGACAAACGGTATAATCCTGCCTTGAAAAGTCGGCTGACCATTAGTAAGGATACCTCAAAAAATCAAGTGTACT
TGCAAATGAATAGCCTTGACGCCGAGGATACGGCTGTATATTATTGCGCGCGGATGGAACTCTGGTCTTACTACTTT
GATTATTGGGGGCAGGGGACTCTCGTCACGGTGTCGACTGGCGGTGGAGGGTCCGGCGGTGGTGGATCATTCCTAAA
CTCATTATTCAACCAAGAAGTTCAAATTCCCTTGACCGAAAGTTACTGTGGCCCATGTCCTAAAAACTGGATATGTT
ACAAAAATAACTGCTACCAATTTTTTGATGAGAGTAAAAACTGGTATGAGAGCCAGGCTTCTTGTATGTCTCAAAAT
GCCAGCCTTCTGAAAGTATACAGCAAAGAGGACCAGGATTTACTTAAACTGGTGAAGTCATATCATTGGATGGGACT
AGTACACATTCCAACAAATGGATCTTGGCAGTGGGAAGATGGCTCCATTCTCTCACCCAACCTACTAACAATAATTG
AAATGCAGAAGGGAGACTGTGCACTCTATGCCTCGAGCTTTAAAGGCTATATAGAAAACTGTTCAACTCCAAATACG
TACATCTGCATGCAAAGGACTGTGCGTACGGTGGCTGCACCATCTGTCTTCATCTTCCCGCCATCTGATGAGCAGTT
GAAATCTGGAACTGCCTCTGTTGTGTGCCTGCTGAATAACTTCTATCCCAGAGAGGCCAAAGTACAGTGGAAGGTGG
ATAACGCCCTCCAATCGGGTAACTCCCAGGAGAGTGTCACAGAGCAGGACAGCAAGGACAGCACCTACAGCCTCAGC
AGCACCCTGACGCTGAGCAAAGCAGACTACGAGAAACACAAAGTCTACGCCTGCGAAGTCACCCATCAGGGCCTGAG
CTCGCCCGTCACAAAGAGCTTCAACAGGGGAGAGTGTGGAGGCGACAAAACTCACACATGCCCACCGTGCCCAGCAC
CTGAAGCCGCGGGGGGACCGTCAGTCTTCCTCTTCCCCCCAAAACCCAAGGACACCCTCATGATCTCCCGGACCCCT
GAGGTCACATGCGTGGTGGTGGACGTGAGCCACGAAGACCCTGAGGTCAAGTTCAACTGGTACGTGGACGGCGTGGA
GGTGCATAATGCCAAGACAAAGCCGCGGGAGGAGCAGTACGCCAGCACGTACCGTGTGGTCAGCGTCCTCACCGTCC
TGCACCAGGACTGGCTGAATGGCAAGGAGTACAAGTGCGCGGTCTCCAACAAAGCCCTCCCAGCCCCCATCGAGAAA
ACCATCTCCAAAGCCAAAGGGCAGCCCCGAGAACCACAGGTGTACACCCTGCCCCCATGTCGGGATGAGCTGACCAA
GAACCAGGTCAGCCTGTGGTGCCTGGTCAAAGGCTTCTATCCCAGCGACATCGCCGTGGAGTGGGAGAGCAATGGGC
AGCCGGAGAACAACTACAAGACCACGCCTCCCGTGCTGGACTCCGACGGCTCCTTCTTCCTCTATAGCAAGCTCACC
GTGGACAAGAGCAGGTGGCAGCAGGGGAACGTCTTCTCATGCTCCGTGATGCATGAGGCTCTGCACAACCACTACAC
GCAGAAGAGCCTCTCCCTGTCTCCGGGTGGCGGTGGAGGGTCCGGCGGTGGTGGATCCGAGGTGCAGCTGTTGGAGT
CTGGGGGAGGCTTGGTACAGCCTGGGGGGTCCCTGAGACTCTCCTGTGCAGCCTCTGGATTCTCCTTCAGTAGCGGG
TACGACATGTGCTGGGTCCGCCAGGCTCCAGGGAAGTGCCTGGAGTGGATCGCATGCATTGCTGCTGGTAGTGCTGG
TATCACTTACGACGCGAACTGGGCGAAAGGCCGGTTCACCATCTCCAGAGACAATTCCAAGAACACGCTGTATCTGC
AAATGAACAGCCTGAGAGCCGAGGACACGGCCGTATATTACTGTGCGAGATCGGCGTTTTCGTTCGACTACGCCATG
GACCTCTGGGGCCAGGGAACCCTGGTCACCGTCTCGTCTGGTGGAGGCGGTTCAGGCGGAGGTGGAAGTGGTGGTGG
CGGCTCTGGAGGCGGCGGATCTGACATCCAGATGACCCAGTCTCCTTCCACCCTGTCTGCATCTGTAGGAGACAGAG
TCACCATCACTTGCCAGGCCAGTCAGAGCATTAGTTCCCACTTAAACTGGTATCAGCAGAAACCAGGGAAAGCCCCT
AAGCTCCTGATCTATAAGGCATCCACTCTGGCATCTGGGGTCCCATCAAGGTTCAGCGGCAGTGGATCTGGGACAGA
ATTTACTCTCACCATCAGCAGCCTGCAGCCTGATGATTTTGCAACTTATTACTGCCAACAGGGTTATAGTTGGGGTA
ATGTTGATAATGTTTTCGGCTGCGGGACCAAGGTGGAGATCAAATAG
>Sequence ID 181: SI-1C3 Heavy Chain Amino Acid Sequence
QVQLQESGPGLVKPSETLSLTCTVSGGSVSSGDYYWTWIRQSPGKGLEWIGHIYYSGNTNYNPSLKSRLTISIDTSK
TQFSLKLSSVTAADTAIYYCVRDRVTGAFDIWGQGTMVTVSSASTKGPSVFPLAPSSKSTSGGTAALGCLVKDYFPE
PVTVSWNSGALTSGVHTFPAVLQSSGLYSLSSVVTVPSSSLGTQTYICNVNHKPSNTKVDKRVEPKSCDKTHTCPPC
PAPELLGGPSVFLFPPKPKDTLMISRTPEVTCVVVDVSHEDPEVKFNWYVDGVEVHNAKTKPREEQYNSTYRVVSVL
TVLHQDWLNGKEYKCKVSNKALPAPIEKTISKAKGQPREPQVYTLPPSREEMTKNQVSLTCLVKGFYPSDIAVEWES
NGQPENNYKTTPPVLDSDGSFFLYSKLTVDKSRWQQGNVFSCSVMHEALHNHYTQKSLSLSPGK
>Sequence ID 182: SI-1C3 Heavy Chain Nucleotide Sequence
CAGGTGCAGCTGCAGGAGTCGGGCCCAGGACTGGTGAAGCCTTCGGAGACCCTGTCCCTCACCTGCACTGTCTCTGG
TGGCTCCGTCAGCAGTGGTGATTACTACTGGACCTGGATCCGGCAGTCCCCAGGGAAGGGACTGGAGTGGATTGGAC
ACATCTATTACAGTGGGAACACCAATTATAACCCCTCCCTCAAGAGCCGACTCACCATATCAATTGACACGTCCAAG
ACTCAGTTCTCCCTGAAGCTGAGTTCTGTGACCGCTGCGGACACGGCCATTTATTACTGTGTGCGAGATCGAGTGAC
TGGTGCTTTTGATATCTGGGGCCAAGGGACAATGGTCACCGTCTCGAGCGCTAGCACCAAGGGCCCATCGGTCTTCC
CCCTGGCACCCTCCTCCAAGAGCACCTCTGGGGGCACAGCGGCCCTGGGCTGCCTGGTCAAGGACTACTTCCCCGAA
CCGGTGACGGTGTCGTGGAACTCAGGCGCCCTGACCAGCGGCGTGCACACCTTCCCGGCTGTCCTACAGTCCTCAGG
ACTCTACTCCCTCAGCAGCGTGGTGACCGTGCCCTCCAGCAGCTTGGGCACCCAGACCTACATCTGCAACGTGAATC
ACAAGCCCAGCAACACCAAGGTGGACAAGAGAGTTGAGCCCAAATCTTGTGACAAAACTCACACATGCCCACCGTGC
CCAGCACCTGAACTCCTGGGGGGACCGTCAGTCTTCCTCTTCCCCCCAAAACCCAAGGACACCCTCATGATCTCCCG
GACCCCTGAGGTCACATGCGTGGTGGTGGACGTGAGCCACGAAGACCCTGAGGTCAAGTTCAACTGGTACGTGGACG
GCGTGGAGGTGCATAATGCCAAGACAAAGCCGCGGGAGGAGCAGTACAACAGCACGTACCGTGTGGTCAGCGTCCTC
ACCGTCCTGCACCAGGACTGGCTGAATGGCAAGGAGTACAAGTGCAAGGTCTCCAACAAAGCCCTCCCAGCCCCCAT
CGAGAAAACCATCTCCAAAGCCAAAGGGCAGCCCCGAGAACCACAGGTGTACACCCTGCCCCCATCCCGGGAGGAGA
TGACCAAGAACCAGGTCAGCCTGACCTGCCTGGTCAAAGGCTTCTATCCCAGCGACATCGCCGTGGAGTGGGAGAGC
AATGGGCAGCCGGAGAACAACTACAAGACCACGCCTCCCGTGCTGGACTCCGACGGCTCCTTCTTCCTCTATAGCAA
GCTCACCGTGGACAAGAGCAGGTGGCAGCAGGGGAACGTCTTCTCATGCTCCGTGATGCATGAGGCTCTGCACAACC
ACTACACGCAGAAGAGCCTCTCCCTGTCTCCGGGTAAATGA
>Sequence ID 183: SI-1C3 Light Chain Amino Acid Sequence
DIQMTQSPSSLSASVGDRVTITCQASQDISNYLNWYQQKPGKAPKLLIYDASNLETGVPSRFSGSGSGTDFTFTISS
LQPEDIATYFCQHFDHLPLAFGGGTKVEIKRTVAAPSVFIFPPSDEQLKSGTASVVCLLNNFYPREAKVQWKVDNAL
QSGNSQESVTEQDSKDSTYSLSSTLTLSKADYEKHKVYACEVTHQGLSSPVTKSFNRGEC
>Sequence ID 184: SI-1C3 Light Chain Nucleotide Sequence
GACATCCAGATGACCCAGTCTCCATCCTCCCTGTCTGCATCTGTAGGAGACAGAGTCACCATCACTTGCCAGGCGAG
TCAGGACATCAGCAACTATTTAAATTGGTATCAGCAGAAACCAGGGAAAGCCCCTAAACTCCTGATCTACGATGCAT
CCAATTTGGAAACAGGGGTCCCATCAAGGTTCAGTGGAAGTGGATCTGGGACAGATTTTACTTTCACCATCAGCAGC
CTGCAGCCTGAAGATATTGCAACATATTTCTGTCAACACTTTGATCATCTCCCGCTCGCTTTCGGCGGAGGGACCAA
GGTGGAAATTAAACGTACGGTGGCTGCACCATCTGTCTTCATCTTCCCGCCATCTGATGAGCAGTTGAAATCTGGAA
CTGCCTCTGTTGTGTGCCTGCTGAATAACTTCTATCCCAGAGAGGCCAAAGTACAGTGGAAGGTGGATAACGCCCTC
CAATCGGGTAACTCCCAGGAGAGTGTCACAGAGCAGGACAGCAAGGACAGCACCTACAGCCTCAGCAGCACCCTGAC
GCTGAGCAAAGCAGACTACGAGAAACACAAAGTCTACGCCTGCGAAGTCACCCATCAGGGCCTGAGCTCGCCCGTCA
CAAAGAGCTTCAACAGGGGAGAGTGTTAG
>Sequence ID 185: SI-1C7 Amino Acid Sequence
EPKSSDKTHTCPPCPAPELLGGPSVFLFPPKPKDTLMISRTPEVTCVVVDVSHEDPEVKFNWYVDGVEVHNAKTKPR
EEQYNSTYRVVSVLTVLHQDWLNGKEYKCKVSNKALPAPIEKTISKAKGQPREPQVYTLPPSRDELTKNQVSLTCLV
KGFYPSDIAVEWESNGQPENNYKTTPPVLDSDGSFFLYSKLTVDKSRWQQGNVFSCSVMHEALHNHYTQKSLSLSPG
GGGGSGGGGSQVQLQESGGGLVKPGGSLRLSCAASGFTFSSYWMSWVRQAPGKGLEWVANINRDGSASYYVDSVKGR
FTISRDDAKNSLYLQMNSLRAEDTAVYYCARDRGVGYFDLWGRGTLVTVSSGGGGSGGGGSGGGGSQSALTQPASVS
GSPGQSITISCTGTSSDVGGYNFVSWYQQHPGKAPKLMIYDVSDRPSGVSDRFSGSKSGNTASLIISGLQADDEADY
YCSSYGSSSTHVIFGGGTKVTVL
>Sequence ID 186: SI-1C7 Nucleotide Sequence
GAGCCCAAATCTTCCGACAAAACTCACACATGCCCACCGTGCCCAGCACCTGAACTCCTGGGGGGACCGTCAGTCTT
CCTCTTCCCCCCAAAACCCAAGGACACCCTCATGATCTCCCGGACCCCTGAGGTCACATGCGTGGTGGTGGACGTGA
GCCACGAAGACCCTGAGGTCAAGTTCAACTGGTACGTGGACGGCGTGGAGGTGCATAATGCCAAGACAAAGCCGCGG
GAGGAGCAGTACAACAGCACGTACCGTGTGGTCAGCGTCCTCACCGTCCTGCACCAGGACTGGCTGAATGGCAAGGA
GTACAAGTGCAAGGTCTCCAACAAAGCCCTCCCAGCCCCCATCGAGAAAACCATCTCCAAAGCCAAAGGGCAGCCCC
GAGAACCACAGGTGTACACCCTGCCCCCATCCCGGGATGAGCTGACCAAGAACCAGGTCAGCCTGACCTGCCTGGTC
AAAGGCTTCTATCCCAGCGACATCGCCGTGGAGTGGGAGAGCAATGGGCAGCCGGAGAACAACTACAAGACCACGCC
TCCCGTGCTGGACTCCGACGGCTCCTTCTTCCTCTATAGCAAGCTCACCGTGGACAAGAGCAGGTGGCAGCAGGGGA
ACGTCTTCTCATGCTCCGTGATGCATGAGGCTCTGCACAACCACTACACGCAGAAGAGCCTCTCCCTGTCTCCGGGT
GGCGGTGGAGGGTCCGGCGGTGGTGGATCCCAGGTGCAGCTGCAGGAGTCGGGGGGAGGCCTGGTCAAGCCTGGAGG
GTCCCTGAGACTCTCCTGTGCAGCCTCTGGATTCACCTTTAGTAGTTATTGGATGAGCTGGGTCCGCCAGGCTCCAG
GGAAGGGGCTGGAGTGGGTGGCCAACATAAACCGCGATGGAAGTGCGAGTTACTATGTGGACTCTGTGAAGGGCCGA
TTCACCATCTCCAGAGACGACGCCAAGAACTCACTGTATCTGCAAATGAACAGCCTGAGAGCTGAGGACACGGCTGT
GTATTACTGTGCGAGAGATCGTGGGGTGGGCTACTTCGATCTCTGGGGCCGTGGCACCCTGGTCACCGTCTCGAGCG
GTGGAGGCGGTTCAGGCGGAGGTGGTTCCGGCGGTGGCGGCTCCCAGTCTGCCCTGACTCAGCCTGCCTCCGTGTCT
GGGTCTCCTGGACAGTCGATCACCATCTCCTGCACTGGAACCAGCAGTGACGTTGGTGGTTATAACTTTGTCTCCTG
GTACCAACAACACCCAGGCAAAGCCCCCAAACTCATGATCTATGATGTCAGTGATCGGCCCTCAGGGGTGTCTGATC
GCTTCTCCGGCTCCAAGTCTGGCAACACGGCCTCCCTGATCATCTCTGGCCTCCAGGCTGACGACGAGGCTGATTAT
TACTGCAGCTCATATGGGAGCAGCAGCACTCATGTGATTTTCGGCGGAGGGACCAAGGTGACCGTCCTATAA
>Sequence ID 187: SI-9C21 Heavy Chain Amino Acid Sequence
EVQLVESGGGLVQPGGSLRLSCTASGFTISTNAMSWVRQAPGKGLEWVGVITGRDITYYASWAKGRFTISRDTSKNT
VYLQMNSLRAEDTAVYYCARDGGSSAITSNNIWGQGTLVTVSSASTKGPSVFPLAPSSKSTSGGTAALGCLVKDYFP
EPVTVSWNSGALTSGVHTFPAVLQSSGLYSLSSVVTVPSSSLGTQTYICNVNHKPSNTKVDKRVEPKSCDKTHTCPP
CPAPEAAGAPSVFLFPPKPKDTLMISRTPEVTCVVVDVSHEDPEVKFNWYVDGVEVHNAKTKPREEQYNSTYRVVSV
LTVLHQDWLNGKEYKCAVSNKALPAPIEKTISKAKGQPREPQVYTLPPSRDELTKNQVSLTCLVKGFYPSDIAVEWE
SNGQPENNYKTTPPVLDSDGSFLLYSKLTVDKSRWQQGNVFSCSVMHEALHNHYTQKSLSLSPG
>Sequence ID 188: SI-9C21 Heavy Chain Nucleotide Sequence
GAAGTCCAATTGGTAGAAAGTGGCGGTGGTCTGGTGCAACCTGGTGGATCTCTTCGCCTCTCATGCACGGCTAGTGG
CTTTACTATTTCAACTAATGCGATGAGCTGGGTTCGCCAGGCCCCCGGCAAAGGACTTGAGTGGGTCGGCGTCATCA
CCGGCAGGGACATTACATACTATGCGAGTTGGGCAAAGGGCAGGTTCACGATTAGCCGCGATACTTCAAAGAATACC
GTTTACCTTCAAATGAATAGCTTGCGCGCGGAAGACACAGCTGTGTATTACTGCGCGCGGGATGGAGGTAGTTCCGC
CATAACTTCCAACAACATATGGGGACAAGGCACGCTGGTTACTGTGTCGTCAGCTAGCACCAAGGGCCCATCGGTCT
TCCCCCTGGCACCCTCCTCCAAGAGCACCTCTGGGGGCACAGCGGCCCTGGGCTGCCTGGTCAAGGACTACTTCCCC
GAACCGGTGACGGTGTCGTGGAACTCAGGCGCCCTGACCAGCGGCGTGCACACCTTCCCGGCTGTCCTACAGTCCTC
AGGACTCTACTCCCTCAGCAGCGTGGTGACCGTGCCCTCCAGCAGCTTGGGCACCCAGACCTACATCTGCAACGTGA
ATCACAAGCCCAGCAACACCAAGGTGGACAAGAGAGTTGAGCCCAAATCTTGTGACAAAACTCACACATGCCCACCG
TGCCCAGCACCTGAAGCCGCGGGGGCACCGTCAGTCTTCCTCTTCCCCCCAAAACCCAAGGACACCCTCATGATCTC
CCGGACCCCTGAGGTCACATGCGTGGTGGTGGACGTGAGCCACGAAGACCCTGAGGTCAAGTTCAACTGGTACGTGG
ACGGCGTGGAGGTGCATAATGCCAAGACAAAGCCGCGGGAGGAGCAGTACAACAGCACGTACCGTGTGGTCAGCGTC
CTCACCGTCCTGCACCAGGACTGGCTGAATGGCAAGGAGTACAAGTGCGCGGTCTCCAACAAAGCCCTCCCAGCCCC
CATCGAGAAAACCATCTCCAAAGCCAAAGGGCAGCCCCGAGAACCACAGGTGTACACCCTGCCCCCATCCCGGGATG
AGCTGACCAAGAACCAGGTCAGCCTGACCTGCCTGGTCAAAGGCTTCTATCCCAGCGACATCGCCGTGGAGTGGGAG
AGCAATGGGCAGCCGGAGAACAACTACAAGACCACGCCTCCCGTGCTGGACTCCGACGGCTCCTTCCTGCTCTATAG
CAAGCTCACCGTGGACAAGAGCAGGTGGCAGCAGGGGAACGTCTTCTCATGCTCCGTGATGCATGAGGCTCTGCACA
ACCACTACACGCAGAAGAGCCTCTCCCTGTCTCCGGGTTGA
>Sequence ID 189: SI-9C21 Light Chain Amino Acid Sequence
EIVMTQSPSTLSASVGDRVIITCQASESISSWLAWYQQKPGKAPKLLIYEASKLASGVPSRFSGSGSGAEFTLTISS
LQPDDFATYYCQGYFYFISRTYVNSFGQGTKLTVLRTVAAPSVFIFPPSDEQLKSGTASVVCLLNNFYPREAKVQWK
VDNALQSGNSQESVTEQDSKDSTYSLSSTLTLSKADYEKHKVYACEVTHQGLSSPVTKSFNRGEC
>Sequence ID 190: SI-9C21 Light Chain Nucleotide Sequence
GAAATCGTTATGACGCAGAGTCCCTCCACGCTCTCCGCTAGTGTCGGGGATCGCGTCATTATCACATGCCAGGCCTC
CGAGTCAATCAGCAGCTGGCTTGCATGGTATCAACAGAAGCCGGGAAAAGCTCCTAAATTGCTGATCTATGAAGCGT
CAAAATTGGCGTCTGGTGTCCCATCTAGGTTCTCCGGCTCTGGGTCTGGTGCGGAATTTACTTTGACAATCTCCAGT
CTTCAACCAGACGATTTCGCTACCTACTACTGCCAAGGGTATTTCTATTTTATAAGCCGGACATATGTAAACTCCTT
CGGCCAAGGAACAAAGTTGACTGTTCTTCGTACGGTGGCTGCACCATCTGTCTTCATCTTCCCGCCATCTGATGAGC
AGTTGAAATCTGGAACTGCCTCTGTTGTGTGCCTGCTGAATAACTTCTATCCCAGAGAGGCCAAAGTACAGTGGAAG
GTGGATAACGCCCTCCAATCGGGTAACTCCCAGGAGAGTGTCACAGAGCAGGACAGCAAGGACAGCACCTACAGCCT
CAGCAGCACCCTGACGCTGAGCAAAGCAGACTACGAGAAACACAAAGTCTACGCCTGCGAAGTCACCCATCAGGGCC
TGAGCTCGCCCGTCACAAAGAGCTTCAACAGGGGAGAGTGTTAG
>Sequence ID 191: SI-35FS11 Amino Acid Sequence
EPKSSDKTHTCPPCPAPEAAGAPSVFLFPPKPKDTLMISRTPEVTCVVVDVSHEDPEVKFNWYVDGVEVHNAKTKPR
EEQYNSTYRVVSVLTVLHQDWLNGKEYKCAVSNKALPAPIEKTISKAKGQPREPQVYTLPPSRDELTKNQVSLTCLV
KGFYPSDIAVEWESNGQPENNYKTTPPVLDSDGSFFLYSKLTVDKSRWQQGNVFSCSVMHEALHNHYTQKSLSLSPG
GGGGSGGGGSRSLVESGGGLVQPGGSLRLSCTASGFTISSYHMQWVRQAPGKGLEYIGTISSGGNVYYASSARGRFT
ISRPSSKNTVDLQMNSLRAEDTAVYYCARDSGYSDPMWGQGTLVTVSSGGGGSGGGGSGGGGSGGGGSDVVMTQSPS
SVSASVGDRVTITCQASQNIRTYLSWYQQKPGKAPKLLIYAAANLASGVPSRFSGSGSGTDFTLTISDLEPGDAATY
YCQSTYLGTDYVGGAFGGGTKVEIK
>Sequence ID 192: SI-35FS11 Nucleotide Sequence
GAGCCCAAATCTTCCGACAAAACTCACACATGCCCACCGTGCCCAGCACCTGAAGCCGCGGGGGCACCGTCAGTCTT
CCTCTTCCCCCCAAAACCCAAGGACACCCTCATGATCTCCCGGACCCCTGAGGTCACATGCGTGGTGGTGGACGTGA
GCCACGAAGACCCTGAGGTCAAGTTCAACTGGTACGTGGACGGCGTGGAGGTGCATAATGCCAAGACAAAGCCGCGG
GAGGAGCAGTACAACAGCACGTACCGTGTGGTCAGCGTCCTCACCGTCCTGCACCAGGACTGGCTGAATGGCAAGGA
GTACAAGTGCGCGGTCTCCAACAAAGCCCTCCCAGCCCCCATCGAGAAAACCATCTCCAAAGCCAAAGGGCAGCCCC
GAGAACCACAGGTGTACACCCTGCCCCCATCCCGGGATGAGCTGACCAAGAACCAGGTCAGCCTGACCTGCCTGGTC
AAAGGCTTCTATCCCAGCGACATCGCCGTGGAGTGGGAGAGCAATGGGCAGCCGGAGAACAACTACAAGACCACGCC
TCCCGTGCTGGACTCCGACGGCTCCTTCTTCCTCTATAGCAAGCTCACCGTGGACAAGAGCAGGTGGCAGCAGGGGA
ACGTCTTCTCATGCTCCGTGATGCATGAGGCTCTGCACAACCACTACACGCAGAAGAGCCTCTCCCTGTCTCCGGGT
GGCGGTGGAGGGTCCGGCGGTGGTGGATCCCGGTCGCTGGTGGAGTCTGGGGGAGGCTTGGTCCAGCCTGGGGGGTC
CCTGAGACTCTCCTGTACTGCCTCTGGATTCACCATCAGTAGCTACCACATGCAGTGGGTCCGCCAGGCTCCAGGGA
AGGGGCTGGAGTACATCGGAACCATTAGTAGTGGTGGTAATGTATACTACGCGAGCTCCGCGAGAGGCAGATTCACC
ATCTCCAGACCCTCGTCCAAGAACACGGTGGATCTTCAAATGAACAGCCTGAGAGCCGAGGACACGGCTGTGTATTA
CTGTGCGAGAGACTCTGGTTATAGTGATCCTATGTGGGGCCAGGGAACCCTGGTCACCGTCTCTTCAGGCGGTGGCG
GTAGTGGGGGAGGCGGTTCTGGCGGCGGAGGGTCCGGCGGTGGAGGATCAGACGTTGTGATGACCCAGTCTCCATCT
TCCGTGTCTGCATCTGTAGGAGACAGAGTCACCATCACCTGTCAGGCCAGTCAGAACATTAGGACTTACTTATCCTG
GTATCAGCAGAAACCAGGGAAAGCCCCTAAGCTCCTGATCTATGCTGCAGCCAATCTGGCATCTGGGGTCCCATCAA
GGTTCAGCGGCAGTGGATCTGGGACAGATTTCACTCTCACCATCAGCGACCTGGAGCCTGGCGATGCTGCAACTTAC
TATTGTCAGTCTACCTATCTTGGTACTGATTATGTTGGCGGTGCTTTCGGCGGAGGGACCAAGGTGGAGATCAAATG
A
>Sequence ID 193: SI-3FS11 Amino Acid Sequence
EPKSSDKTHTCPPCPAPEAAGAPSVFLFPPKPKDTLMISRTPEVTCVVVDVSHEDPEVKFNWYVDGVEVHNAKTKPR
EEQYNSTYRVVSVLTVLHQDWLNGKEYKCAVSNKALPAPIEKTISKAKGQPREPQVYTLPPSRDELTKNQVSLTCLV
KGFYPSDIAVEWESNGQPENNYKTTPPVLDSDGSFFLYSKLTVDKSRWQQGNVFSCSVMHEALHNHYTQKSLSLSPG
GGGGSGGGGSEVQLLESGGGLVQPGGSLRLSCAASGFSFSSGYDMCWVRQAPGKGLEWIACIAAGSAGITYDANWAK
GRFTISRDNSKNTLYLQMNSLRAEDTAVYYCARSAFSFDYAMDLWGQGTLVTVSSGGGGSGGGGSGGGGSGGGGSDI
QMTQSPSTLSASVGDRVTITCQASQSISSHLNWYQQKPGKAPKLLIYKASTLASGVPSRFSGSGSGTEFTLTISSLQ
PDDFATYYCQQGYSWGNVDNVFGGGTKVEIK
>Sequence ID 194: SI-3FS11 Nucleotide Sequence
GAGCCCAAATCTTCCGACAAAACTCACACATGCCCACCGTGCCCAGCACCTGAAGCCGCGGGGGCACCGTCAGTCTT
CCTCTTCCCCCCAAAACCCAAGGACACCCTCATGATCTCCCGGACCCCTGAGGTCACATGCGTGGTGGTGGACGTGA
GCCACGAAGACCCTGAGGTCAAGTTCAACTGGTACGTGGACGGCGTGGAGGTGCATAATGCCAAGACAAAGCCGCGG
GAGGAGCAGTACAACAGCACGTACCGTGTGGTCAGCGTCCTCACCGTCCTGCACCAGGACTGGCTGAATGGCAAGGA
GTACAAGTGCGCGGTCTCCAACAAAGCCCTCCCAGCCCCCATCGAGAAAACCATCTCCAAAGCCAAAGGGCAGCCCC
GAGAACCACAGGTGTACACCCTGCCCCCATCCCGGGATGAGCTGACCAAGAACCAGGTCAGCCTGACCTGCCTGGTC
AAAGGCTTCTATCCCAGCGACATCGCCGTGGAGTGGGAGAGCAATGGGCAGCCGGAGAACAACTACAAGACCACGCC
TCCCGTGCTGGACTCCGACGGCTCCTTCTTCCTCTATAGCAAGCTCACCGTGGACAAGAGCAGGTGGCAGCAGGGGA
ACGTCTTCTCATGCTCCGTGATGCATGAGGCTCTGCACAACCACTACACGCAGAAGAGCCTCTCCCTGTCTCCGGGT
GGCGGTGGAGGGTCCGGCGGTGGTGGATCCGAGGTGCAGCTGTTGGAGTCTGGGGGAGGCTTGGTACAGCCTGGGGG
GTCCCTGAGACTCTCCTGTGCAGCCTCTGGATTCTCCTTCAGTAGCGGGTACGACATGTGCTGGGTCCGCCAGGCTC
CAGGGAAGGGGCTGGAGTGGATCGCATGCATTGCTGCTGGTAGTGCTGGTATCACTTACGACGCGAACTGGGCGAAA
GGCCGGTTCACCATCTCCAGAGACAATTCCAAGAACACGCTGTATCTGCAAATGAACAGCCTGAGAGCCGAGGACAC
GGCCGTATATTACTGTGCGAGATCGGCGTTTTCGTTCGACTACGCCATGGACCTCTGGGGCCAGGGAACCCTGGTCA
CCGTCTCGAGCGGTGGAGGCGGATCTGGCGGAGGTGGTTCCGGCGGTGGCGGCTCCGGTGGAGGCGGCTCTGACATC
CAGATGACCCAGTCTCCTTCCACCCTGTCTGCATCTGTAGGAGACAGAGTCACCATCACTTGCCAGGCCAGTCAGAG
CATTAGTTCCCACTTAAACTGGTATCAGCAGAAACCAGGGAAAGCCCCTAAGCTCCTGATCTATAAGGCATCCACTC
TGGCATCTGGGGTCCCATCAAGGTTCAGCGGCAGTGGATCTGGGACAGAATTTACTCTCACCATCAGCAGCCTGCAG
CCTGATGATTTTGCAACTTATTACTGCCAACAGGGTTATAGTTGGGGTAATGTTGATAATGTTTTCGGCGGAGGGAC
CAAGGTGGAGATCAAATAA
>Sequence ID 195: SI-68X1 Chain A Amino Acid Sequence
DIQMTQSPSTLSASVGDRVTITCQASENIYSNLAWYQQKPGKAPKLLIYDASTLASGVPSRFSGSGSGTEFTLTISS
LQPDDFATYYCQSTYYNNIIYGAAFGCGTKVEIKGGGGSGGGGSGGGGSGGGGSEVQLVESGGGLVQPGGSLRLSCA
ASGFSFSGTQYVCWVRQAPGKCLEWIGCIYVDVANTYYATSVKGRFTISRDNSKNTLYLQMNSLRAEDTAVYYCASH
DTVCAGCGLDLWGQGTLVTVSTGGGGSGGGGSEVQLVESGGGLVQPGGSLRLSCAASGFTISTNAMSWVRQAPGKGL
EWIGVITGRDITYYASWAKGRFTISRDNSKNTLYLQMNSLRAEDTAVYYCARDGGSSAITSNNIWGQGTLVTVSSAS
TKGPSVFPLAPSSKSTSGGTAALGCLVKDYFPEPVTVSWNSGALTSGVHTFPAVLQSSGLYSLSSVVTVPSSSLGTQ
TYICNVNHKPSNTKVDKRVEPKSCDKTHTCPPCPAPEAAGGPSVFLFPPKPKDTLMISRTPEVTCVVVDVSHEDPEV
KFNWYVDGVEVHNAKTKPREEQYASTYRVVSVLTVLHQDWLNGKEYKCAVSNKALPAPIEKTISKAKGQPREPQVCT
LPPSRDELTKNQVSLSCAVKGFYPSDIAVEWESNGQPENNYKTTPPVLDSDGSFFLVSKLTVDKSRWQQGNVFSCSV
MHEALHNHYTQKSLSLSPGK
>Sequence ID 196: SI-68X1 Chain A Nucleotide Sequence
GACATCCAGATGACCCAGTCTCCTTCCACCCTGTCTGCATCTGTAGGAGACAGAGTCACCATCACTTGCCAGGCCAG
TGAGAACATTTACAGCAATTTAGCCTGGTATCAGCAGAAACCAGGGAAAGCCCCTAAGCTCCTGATCTATGATGCTT
CCACTCTGGCATCTGGGGTCCCATCAAGGTTCAGCGGCAGTGGATCTGGGACAGAATTCACTCTCACCATCAGCAGC
CTGCAGCCTGATGATTTTGCAACTTATTACTGCCAATCTACTTATTATAATAATATCATTTATGGGGCTGCTTTCGG
CTGTGGGACCAAGGTGGAGATCAAAGGCGGTGGCGGTAGTGGGGGAGGCGGTTCTGGCGGCGGAGGGTCCGGCGGTG
GAGGATCAGAGGTGCAGCTGGTGGAGTCTGGGGGAGGCTTGGTCCAGCCTGGGGGGTCCCTGAGACTCTCCTGTGCA
GCCTCTGGATTCTCCTTCAGTGGCACCCAGTACGTGTGCTGGGTCCGCCAGGCTCCAGGGAAGTGCCTGGAGTGGAT
CGGATGCATTTATGTGGATGTGGCTAACACTTACTACGCGACCTCCGTGAAGGGCAGATTCACCATCTCCAGAGACA
ATTCCAAGAACACGCTGTATCTTCAAATGAACAGCCTGAGAGCCGAGGACACGGCTGTGTATTACTGTGCGAGTCAT
GATACTGTTTGTGCTGGTTGTGGTTTGGACTTGTGGGGCCAGGGAACCCTGGTCACCGTGTCGACAGGCGGTGGAGG
GTCCGGCGGTGGTGGATCAGAGGTGCAGCTGGTGGAGTCTGGGGGAGGCTTGGTCCAGCCTGGGGGGTCCCTGAGAC
TCTCCTGTGCAGCCTCTGGATTCACCATCAGTACCAATGCAATGAGCTGGGTCCGCCAGGCTCCAGGGAAGGGGCTG
GAGTGGATCGGAGTCATTACTGGTCGTGATATCACATACTACGCGAGCTGGGCGAAAGGCAGATTCACCATCTCCAG
AGACAATTCCAAGAACACGCTGTATCTTCAAATGAACAGCCTGAGAGCCGAGGACACGGCTGTGTATTACTGTGCGA
GAGACGGTGGTTCTTCTGCTATTACTAGTAACAACATTTGGGGCCAGGGAACCCTGGTCACCGTGTCCTCAGCTAGC
ACCAAGGGCCCATCGGTCTTCCCCCTGGCACCCTCCTCCAAGAGCACCTCTGGGGGCACAGCGGCCCTGGGCTGCCT
GGTCAAGGACTACTTCCCCGAACCGGTGACGGTGTCGTGGAACTCAGGCGCCCTGACCAGCGGCGTGCACACCTTCC
CGGCTGTCCTACAGTCCTCAGGACTCTACTCCCTCAGCAGCGTGGTGACCGTGCCCTCCAGCAGCTTGGGCACCCAG
ACCTACATCTGCAACGTGAATCACAAGCCCAGCAACACCAAGGTGGACAAGAGAGTTGAGCCCAAATCTTGTGACAA
AACTCACACATGCCCACCGTGCCCAGCACCTGAAGCCGCGGGGGGACCGTCAGTCTTCCTCTTCCCCCCAAAACCCA
AGGACACCCTCATGATCTCCCGGACCCCTGAGGTCACATGCGTGGTGGTGGACGTGAGCCACGAAGACCCTGAGGTC
AAGTTCAACTGGTACGTGGACGGCGTGGAGGTGCATAATGCCAAGACAAAGCCGCGGGAGGAGCAGTACGCCAGCAC
GTACCGTGTGGTCAGCGTCCTCACCGTCCTGCACCAGGACTGGCTGAATGGCAAGGAGTACAAGTGCGCGGTCTCCA
ACAAAGCCCTCCCAGCCCCCATCGAGAAAACCATCTCCAAAGCCAAAGGGCAGCCCCGAGAACCACAGGTGTGTACC
CTGCCCCCATCCCGGGATGAGCTGACCAAGAACCAGGTCAGCCTGTCCTGCGCCGTCAAAGGCTTCTATCCCAGCGA
CATCGCCGTGGAGTGGGAGAGCAATGGGCAGCCGGAGAACAACTACAAGACCACGCCTCCCGTGCTGGACTCCGACG
GCTCCTTCTTCCTCGTGAGCAAGCTCACCGTGGACAAGAGCAGGTGGCAGCAGGGGAACGTCTTCTCATGCTCCGTG
ATGCATGAGGCTCTGCACAACCACTACACGCAGAAGAGCCTCTCCCTGTCTCCGGGTAAA
>Sequence ID 197: SI-68X1 Chain B Amino Acid Sequence
DIQMTQSPSSLSASVGDRVTITCQASQDISNYLNWYQQKPGKAPKLLIYDASNLETGVPSRFSGSGSGTDFTFTISS
LQPEDIATYFCQHFDHLPLAFGCGTKVEIKGGGGSGGGGSGGGGSGGGGSQVQLQESGPGLVKPSETLSLTCTVSGG
SVSSGDYYWTWIRQSPGKCLEWIGHIYYSGNTNYNPSLKSRLTISIDTSKTQFSLKLSSVTAADTAIYYCVRDRVTG
AFDIWGQGTMVTVSTGGGGSGGGGSDVVMTQSPSTLSASVGDRVTINCQASESISSWLAWYQQKPGKAPKLLIYEAS
KLASGVPSRFSGSGSGTEFTLTISSLQPDDFATYYCQGYFYFISRTYVNSFGGGTKVEIKRTVAAPSVFIFPPSDEQ
LKSGTASVVCLLNNFYPREAKVQWKVDNALQSGNSQESVTEQDSKDSTYSLSSTLTLSKADYEKHKVYACEVTHQGL
SSPVTKSFNRGECGGDKTHTCPPCPAPEAAGGPSVFLFPPKPKDTLMISRTPEVTCVVVDVSHEDPEVKFNWYVDGV
EVHNAKTKPREEQYASTYRVVSVLTVLHQDWLNGKEYKCAVSNKALPAPIEKTISKAKGQPREPQVYTLPPCRDELT
KNQVSLWCLVKGFYPSDIAVEWESNGQPENNYKTTPPVLDSDGSFFLYSKLTVDKSRWQQGNVFSCSVMHEALHNHY
TQKSLSLSPGK
>Sequence ID 198: SI-68X1 Chain B Nucleotide Sequence
GACATCCAGATGACCCAGTCTCCATCCTCCCTGTCTGCATCTGTAGGAGACAGAGTCACCATCACTTGCCAGGCGAG
TCAGGACATCAGCAACTATTTAAATTGGTATCAGCAGAAACCAGGGAAAGCCCCTAAACTCCTGATCTACGATGCAT
CCAATTTGGAAACAGGGGTCCCATCAAGGTTCAGTGGAAGTGGATCTGGGACAGATTTTACTTTCACCATCAGCAGC
CTGCAGCCTGAAGATATTGCAACATATTTCTGTCAACACTTTGATCATCTCCCGCTCGCTTTCGGCTGTGGGACCAA
GGTGGAAATTAAAGGCGGTGGCGGTAGTGGGGGAGGCGGTTCTGGCGGCGGAGGGTCCGGCGGTGGAGGATCACAGG
TGCAGCTGCAGGAGTCGGGCCCAGGACTGGTGAAGCCTTCGGAGACCCTGTCCCTCACCTGCACTGTCTCTGGTGGC
TCCGTCAGCAGTGGTGATTACTACTGGACCTGGATCCGGCAGTCCCCAGGGAAGTGCCTGGAGTGGATTGGACACAT
CTATTACAGTGGGAACACCAATTATAACCCCTCCCTCAAGAGCCGACTCACCATATCAATTGACACGTCCAAGACTC
AGTTCTCCCTGAAGCTGAGTTCTGTGACCGCTGCGGACACGGCCATTTATTACTGTGTGCGAGATCGAGTGACTGGT
GCTTTTGATATCTGGGGCCAAGGGACAATGGTCACCGTGTCGACAGGCGGTGGAGGGTCCGGCGGTGGTGGATCAGA
CGTCGTGATGACCCAGTCTCCTTCCACCCTGTCTGCATCTGTAGGAGACAGAGTCACCATCAATTGCCAAGCCAGTG
AGAGCATTAGCAGTTGGTTAGCCTGGTATCAGCAGAAACCAGGGAAAGCCCCTAAGCTCCTGATCTATGAAGCATCC
AAACTGGCATCTGGGGTCCCATCAAGGTTCAGCGGCAGTGGATCTGGGACAGAATTCACTCTCACCATCAGCAGCCT
GCAGCCTGATGATTTTGCAACTTATTACTGCCAAGGCTATTTTTATTTTATTAGTCGTACTTATGTAAATTCTTTCG
GCGGAGGGACCAAGGTGGAGATCAAACGTACGGTGGCTGCACCATCTGTCTTCATCTTCCCGCCATCTGATGAGCAG
TTGAAATCTGGAACTGCCTCTGTTGTGTGCCTGCTGAATAACTTCTATCCCAGAGAGGCCAAAGTACAGTGGAAGGT
GGATAACGCCCTCCAATCGGGTAACTCCCAGGAGAGTGTCACAGAGCAGGACAGCAAGGACAGCACCTACAGCCTCA
GCAGCACCCTGACGCTGAGCAAAGCAGACTACGAGAAACACAAAGTCTACGCCTGCGAAGTCACCCATCAGGGCCTG
AGCTCGCCCGTCACAAAGAGCTTCAACAGGGGAGAGTGTGGAGGCGACAAAACTCACACATGCCCACCGTGCCCAGC
ACCTGAAGCCGCGGGGGGACCGTCAGTCTTCCTCTTCCCCCCAAAACCCAAGGACACCCTCATGATCTCCCGGACCC
CTGAGGTCACATGCGTGGTGGTGGACGTGAGCCACGAAGACCCTGAGGTCAAGTTCAACTGGTACGTGGACGGCGTG
GAGGTGCATAATGCCAAGACAAAGCCGCGGGAGGAGCAGTACGCCAGCACGTACCGTGTGGTCAGCGTCCTCACCGT
CCTGCACCAGGACTGGCTGAATGGCAAGGAGTACAAGTGCGCGGTCTCCAACAAAGCCCTCCCAGCCCCCATCGAGA
AAACCATCTCCAAAGCCAAAGGGCAGCCCCGAGAACCACAGGTGTACACCCTGCCCCCATGTCGGGATGAGCTGACC
AAGAACCAGGTCAGCCTGTGGTGCCTGGTCAAAGGCTTCTATCCCAGCGACATCGCCGTGGAGTGGGAGAGCAATGG
GCAGCCGGAGAACAACTACAAGACCACGCCTCCCGTGCTGGACTCCGACGGCTCCTTCTTCCTCTATAGCAAGCTCA
CCGTGGACAAGAGCAGGTGGCAGCAGGGGAACGTCTTCTCATGCTCCGTGATGCATGAGGCTCTGCACAACCACTAC
ACGCAGAAGAGCCTCTCCCTGTCTCCGGGTAAA
>Sequence ID 199: SI-68X3 Chain A
DIQMTQSPSSLSASVGDRVTITCRASQDVNTAVAWYQQKPGKAPKLLIYSASFLYSGVPSRFSGSRSGTDFTLTISS
LQPEDFATYYCQQHYTTPPTFGQGTKVEIKGGGGSGGGGSGGGGSGGGGSEVQLVESGGGLVQPGGSLRLSCAASGF
NIKDTYIHWVRQAPGKGLEWVARIYPTNGYTRYADSVKGRFTISADTSKNTAYLQMNSLRAEDTAVYYCSRWGGDGF
YAMDYWGQGTLVTVSTGGGGSGGGGSEVQLVESGGGLVQPGGSLRLSCAASGFTISTNAMSWVRQAPGKGLEWIGVI
TGRDITYYASWAKGRFTISRDNSKNTLYLQMNSLRAEDTAVYYCARDGGSSAITSNNIWGQGTLVTVSSASTKGPSV
FPLAPSSKSTSGGTAALGCLVKDYFPEPVTVSWNSGALTSGVHTFPAVLQSSGLYSLSSVVTVPSSSLGTQTYICNV
NHKPSNTKVDKRVEPKSCDKTHTCPPCPAPEAAGGPSVFLFPPKPKDTLMISRTPEVTCVVVDVSHEDPEVKFNWYV
DGVEVHNAKTKPREEQYASTYRVVSVLTVLHQDWLNGKEYKCAVSNKALPAPIEKTISKAKGQPREPQVCTLPPSRD
ELTKNQVSLSCAVKGFYPSDIAVEWESNGQPENNYKTTPPVLDSDGSFFLVSKLTVDKSRWQQGNVFSCSVMHEALH
NHYTQKSLSLSPGK
>Sequence ID 200: SI-68X3 Chain A Nucleotide Sequence
GACATCCAAATGACGCAGTCTCCCTCCAGTTTGAGTGCAAGTGTGGGAGACAGAGTTACGATCACATGTAGGGCAAG
TCAGGACGTCAATACAGCCGTCGCATGGTACCAGCAGAAGCCTGGAAAGGCCCCGAAACTTCTGATTTACTCTGCAA
GTTTCCTCTACAGTGGTGTTCCTAGTCGCTTCAGTGGGTCTCGGTCAGGCACCGATTTTACCCTGACAATTAGCAGC
TTGCAACCGGAAGATTTTGCGACCTATTATTGCCAGCAACATTATACCACCCCTCCCACATTTGGACAAGGCACGAA
GGTAGAGATTAAAGGCGGTGGAGGGAGCGGTGGAGGCGGTTCCGGTGGAGGTGGTTCTGGTGGAGGTGGCAGTGAAG
TACAGCTTGTTGAGAGTGGTGGTGGACTTGTCCAACCAGGGGGAAGTCTGCGGCTGTCATGCGCAGCCTCTGGCTTC
AACATTAAGGACACCTACATTCACTGGGTTCGGCAAGCGCCGGGGAAGGGGCTGGAATGGGTCGCCAGGATATACCC
TACCAACGGGTACACCAGGTATGCAGATAGCGTTAAGGGTAGATTCACTATTTCAGCTGACACTAGCAAGAACACCG
CGTATCTCCAGATGAACTCCCTTCGCGCCGAGGATACGGCTGTGTACTACTGCTCTAGGTGGGGAGGAGATGGGTTT
TACGCAATGGATTACTGGGGACAGGGAACACTCGTTACGGTGTCGACAGGCGGTGGAGGGTCCGGCGGTGGTGGATC
AGAGGTGCAGCTGGTGGAGTCTGGGGGAGGCTTGGTCCAGCCTGGGGGGTCCCTGAGACTCTCCTGTGCAGCCTCTG
GATTCACCATCAGTACCAATGCAATGAGCTGGGTCCGCCAGGCTCCAGGGAAGGGGCTGGAGTGGATCGGAGTCATT
ACTGGTCGTGATATCACATACTACGCGAGCTGGGCGAAAGGCAGATTCACCATCTCCAGAGACAATTCCAAGAACAC
GCTGTATCTTCAAATGAACAGCCTGAGAGCCGAGGACACGGCTGTGTATTACTGTGCGAGAGACGGTGGTTCTTCTG
CTATTACTAGTAACAACATTTGGGGCCAGGGAACCCTGGTCACCGTGTCCTCAGCTAGCACCAAGGGCCCATCGGTC
TTCCCCCTGGCACCCTCCTCCAAGAGCACCTCTGGGGGCACAGCGGCCCTGGGCTGCCTGGTCAAGGACTACTTCCC
CGAACCGGTGACGGTGTCGTGGAACTCAGGCGCCCTGACCAGCGGCGTGCACACCTTCCCGGCTGTCCTACAGTCCT
CAGGACTCTACTCCCTCAGCAGCGTGGTGACCGTGCCCTCCAGCAGCTTGGGCACCCAGACCTACATCTGCAACGTG
AATCACAAGCCCAGCAACACCAAGGTGGACAAGAGAGTTGAGCCCAAATCTTGTGACAAAACTCACACATGCCCACC
GTGCCCAGCACCTGAAGCCGCGGGGGGACCGTCAGTCTTCCTCTTCCCCCCAAAACCCAAGGACACCCTCATGATCT
CCCGGACCCCTGAGGTCACATGCGTGGTGGTGGACGTGAGCCACGAAGACCCTGAGGTCAAGTTCAACTGGTACGTG
GACGGCGTGGAGGTGCATAATGCCAAGACAAAGCCGCGGGAGGAGCAGTACGCCAGCACGTACCGTGTGGTCAGCGT
CCTCACCGTCCTGCACCAGGACTGGCTGAATGGCAAGGAGTACAAGTGCGCGGTCTCCAACAAAGCCCTCCCAGCCC
CCATCGAGAAAACCATCTCCAAAGCCAAAGGGCAGCCCCGAGAACCACAGGTGTGTACCCTGCCCCCATCCCGGGAT
GAGCTGACCAAGAACCAGGTCAGCCTGTCCTGCGCCGTCAAAGGCTTCTATCCCAGCGACATCGCCGTGGAGTGGGA
GAGCAATGGGCAGCCGGAGAACAACTACAAGACCACGCCTCCCGTGCTGGACTCCGACGGCTCCTTCTTCCTCGTGA
GCAAGCTCACCGTGGACAAGAGCAGGTGGCAGCAGGGGAACGTCTTCTCATGCTCCGTGATGCATGAGGCTCTGCAC
AACCACTACACGCAGAAGAGCCTCTCCCTGTCTCCGGGTAAA
>Sequence ID 201: SI-68X3 Chain B Amino Acid Sequence
DVVMTQSPSTLSASVGDRVTINCQASESISSWLAWYQQKPGKAPKLLIYEASKLASGVPSRFSGSGSGTEFTLTISS
LQPDDFATYYCQGYFYFISRTYVNSFGGGTKVEIKRTVAAPSVFIFPPSDEQLKSGTASVVCLLNNFYPREAKVQWK
VDNALQSGNSQESVTEQDSKDSTYSLSSTLTLSKADYEKHKVYACEVTHQGLSSPVTKSFNRGECGGDKTHTCPPCP
APEAAGGPSVFLFPPKPKDTLMISRTPEVTCVVVDVSHEDPEVKFNWYVDGVEVHNAKTKPREEQYASTYRVVSVLT
VLHQDWLNGKEYKCAVSNKALPAPIEKTISKAKGQPREPQVYTLPPCRDELTKNQVSLWCLVKGFYPSDIAVEWESN
GQPENNYKTTPPVLDSDGSFFLYSKLTVDKSRWQQGNVFSCSVMHEALHNHYTQKSLSLSPGK
>Sequence ID 202: SI-68X3 Chain B Nucleotide Sequence
GACGTCGTGATGACCCAGTCTCCTTCCACCCTGTCTGCATCTGTAGGAGACAGAGTCACCATCAATTGCCAAGCCAG
TGAGAGCATTAGCAGTTGGTTAGCCTGGTATCAGCAGAAACCAGGGAAAGCCCCTAAGCTCCTGATCTATGAAGCAT
CCAAACTGGCATCTGGGGTCCCATCAAGGTTCAGCGGCAGTGGATCTGGGACAGAATTCACTCTCACCATCAGCAGC
CTGCAGCCTGATGATTTTGCAACTTATTACTGCCAAGGCTATTTTTATTTTATTAGTCGTACTTATGTAAATTCTTT
CGGCGGAGGGACCAAGGTGGAGATCAAACGTACGGTGGCTGCACCATCTGTCTTCATCTTCCCGCCATCTGATGAGC
AGTTGAAATCTGGAACTGCCTCTGTTGTGTGCCTGCTGAATAACTTCTATCCCAGAGAGGCCAAAGTACAGTGGAAG
GTGGATAACGCCCTCCAATCGGGTAACTCCCAGGAGAGTGTCACAGAGCAGGACAGCAAGGACAGCACCTACAGCCT
CAGCAGCACCCTGACGCTGAGCAAAGCAGACTACGAGAAACACAAAGTCTACGCCTGCGAAGTCACCCATCAGGGCC
TGAGCTCGCCCGTCACAAAGAGCTTCAACAGGGGAGAGTGTGGAGGCGACAAAACTCACACATGCCCACCGTGCCCA
GCACCTGAAGCCGCGGGGGGACCGTCAGTCTTCCTCTTCCCCCCAAAACCCAAGGACACCCTCATGATCTCCCGGAC
CCCTGAGGTCACATGCGTGGTGGTGGACGTGAGCCACGAAGACCCTGAGGTCAAGTTCAACTGGTACGTGGACGGCG
TGGAGGTGCATAATGCCAAGACAAAGCCGCGGGAGGAGCAGTACGCCAGCACGTACCGTGTGGTCAGCGTCCTCACC
GTCCTGCACCAGGACTGGCTGAATGGCAAGGAGTACAAGTGCGCGGTCTCCAACAAAGCCCTCCCAGCCCCCATCGA
GAAAACCATCTCCAAAGCCAAAGGGCAGCCCCGAGAACCACAGGTGTACACCCTGCCCCCATGTCGGGATGAGCTGA
CCAAGAACCAGGTCAGCCTGTGGTGCCTGGTCAAAGGCTTCTATCCCAGCGACATCGCCGTGGAGTGGGAGAGCAAT
GGGCAGCCGGAGAACAACTACAAGACCACGCCTCCCGTGCTGGACTCCGACGGCTCCTTCTTCCTCTATAGCAAGCT
CACCGTGGACAAGAGCAGGTGGCAGCAGGGGAACGTCTTCTCATGCTCCGTGATGCATGAGGCTCTGCACAACCACT
ACACGCAGAAGAGCCTCTCCCTGTCTCCGGGTAAA
>Sequence ID 203: αEGFR VH Amino Acid Sequence
QVQLQQSGPGLVKPSETLSITCTVSGFSLTNYGVHWIRQAPGKGLEWLGVIWSGGNTDYNTPFTSRFTITKDNSKNQ
VYFKLRSVRADDTAIYYCARALTYYDYEFAYWGQGTLVTVSS
>Sequence ID 204: αEGFR VH Nucleotide Sequence
CAAGTACAGTTGCAGCAATCCGGTCCCGGTCTCGTCAAACCGAGTGAGACGCTTAGTATAACGTGTACTGTTTCAGG
CTTTAGCCTTACGAACTATGGAGTTCACTGGATTCGGCAGGCACCCGGCAAAGGTTTGGAATGGCTGGGTGTTATTT
GGTCAGGTGGAAATACAGACTATAACACCCCCTTTACAAGTCGGTTCACAATTACGAAAGATAATTCCAAAAATCAA
GTTTATTTCAAGTTGAGATCCGTCCGCGCGGACGACACTGCGATCTACTATTGTGCGAGGGCACTGACCTACTACGA
TTACGAATTTGCGTATTGGGGGCAAGGGACTCTTGTAACAGTCTCGAGC
>Sequence ID 205: αEGFR VL Amino Acid Sequence
EIVLTQSPSTLSVSPGERATFSCRASQSIGTNIHWYQQKPGKPPRLLIKYASESISGIPDRFSGSGSGTEFTLTISS
VQSEDFAVYYCQQNNNWPTTFGPGTKLTVL
>Sequence ID 206: αEGFR VL Nucleotide Sequence
GAAATCGTCCTTACACAATCTCCTAGCACACTGAGTGTGAGCCCCGGCGAACGCGCGACTTTCTCTTGCAGGGCAAG
TCAATCCATAGGGACTAATATACATTGGTATCAACAAAAGCCAGGTAAACCACCCAGGCTTTTGATTAAGTATGCAA
GTGAGTCTATTTCCGGTATCCCTGACCGCTTCTCTGGATCAGGCAGTGGCACAGAGTTCACACTCACCATATCTAGT
GTGCAATCAGAGGACTTCGCCGTGTATTACTGCCAACAGAATAATAACTGGCCGACTACCTTCGGACCCGGTACAAA
GCTGACCGTTTTA
>Sequence ID 207: αEGFR* VH Amino Acid Sequence
[sequence omitted]
>Sequence ID 208: αEGFR* VH Nucleotide Sequence
CAAGTGCAACTCCAGGAGAGTGGGCCGGGATTGGTTAAACCGAGCGAGACCCTGAGTCTCACGTGTACAGTTTCAGG
CGGGAGCGTGAGCTCAGGCGACTATTACTGGACATGGATAAGACAGAGTCCTGGAAAGGGCCTGGAGTGGATCGGTC
ATATTTATTATTCAGGGAACACTAACTATAATCCATCTTTGAAATCCCGATTGACAATCTCTATCGATACCAGTAAA
ACCCAGTTTAGCCTCAAGCTGTCCAGCGTTACTGCTGCAGACACAGCCATATACTATTGCGTACGCGATCGCGTGAC
TGGAGCCTTCGACATATGGGGGCAGGGAACGATGGTAACAGTCTCGAGC
>Sequence ID 209: αEGFR* VL Amino Acid Sequence
[sequence omitted]
>Sequence ID 210: αEGFR* VL Nucleotide Sequence
GACATCCAGATGACCCAGTCTCCATCCTCCCTGTCTGCATCTGTAGGAGACAGAGTCACCATCACTTGCCAGGCGAG
TCAGGACATCAGCAACTATTTAAATTGGTATCAGCAGAAACCAGGGAAAGCCCCTAAACTCCTGATCTACGATGCAT
CCAATTTGGAAACAGGGGTCCCATCAAGGTTCAGTGGAAGTGGATCTGGGACAGATTTTACTTTCACCATCAGCAGC
CTGCAGCCTGAAGATATTGCAACATATTTCTGTCAACACTTTGATCATCTCCCGCTCGCTTTCGGCGGAGGGACCAA
GGTGGAAATTAAA
>Sequence ID 211: αEGFR* VH Stapled Amino Acid Sequence
QVQLQESGPGLVKPSETLSLTCTVSGGSVSSGDYYWTWIRQSPGKCLEWIGHIYYSGNTNYNPSLKSRLTISIDTSK
TQFSLKLSSVTAADTAIYYCVRDRVTGAFDIWGQGTMVTVST
>Sequence ID 212: αEGFR* VH Stapled Nucleotide Sequence
CAGGTGCAGCTGCAGGAGTCGGGCCCAGGACTGGTGAAGCCTTCGGAGACCCTGTCCCTCACCTGCACTGTCTCTGG
TGGCTCCGTCAGCAGTGGTGATTACTACTGGACCTGGATCCGGCAGTCCCCAGGGAAGTGCCTGGAGTGGATTGGAC
ACATCTATTACAGTGGGAACACCAATTATAACCCCTCCCTCAAGAGCCGACTCACCATATCAATTGACACGTCCAAG
ACTCAGTTCTCCCTGAAGCTGAGTTCTGTGACCGCTGCGGACACGGCCATTTATTACTGTGTGCGAGATCGAGTGAC
TGGTGCTTTTGATATCTGGGGCCAAGGGACAATGGTCACCGTGTCGACA
>Sequence ID 213: αEGFR* VL Stapled Amino Acid Sequence
[sequence omitted]
>Sequence ID 214: αEGFR* VL Stapled Nucleotide Sequence
GACATCCAGATGACCCAGTCTCCATCCTCCCTGTCTGCATCTGTAGGAGACAGAGTCACCATCACTTGCCAGGCGAG
TCAGGACATCAGCAACTATTTAAATTGGTATCAGCAGAAACCAGGGAAAGCCCCTAAACTCCTGATCTACGATGCAT
CCAATTTGGAAACAGGGGTCCCATCAAGGTTCAGTGGAAGTGGATCTGGGACAGATTTTACTTTCACCATCAGCAGC
CTGCAGCCTGAAGATATTGCAACATATTTCTGTCAACACTTTGATCATCTCCCGCTCGCTTTCGGCTGTGGGACCAA
GGTGGAAATTAAA
>Sequence ID 215: αCD19 VH Amino Acid Sequence
QVTLKESGPGLVQPGQTLSLTCAFSGFSLSTSGMGVGWIRQPPGKGLEWLAHIWWDDDKRYNPALKSRLTISKDTSK
NQVYLQMNSLDAEDTAVYYCARMELWSYYFDYWGQGTLVTVSS
>Sequence ID 216: αCD19 VH Nucleotide Sequence
CAGGTCACATTGAAGGAATCTGGCCCCGGCCTTGTTCAGCCAGGACAGACCCTTAGCCTCACCTGTGCCTTCAGTGG
TTTTTCTCTTAGCACTAGCGGTATGGGGGTCGGCTGGATTCGGCAGCCTCCCGGCAAAGGTCTTGAGTGGTTGGCTC
ACATTTGGTGGGACGACGACAAACGGTATAATCCTGCCTTGAAAAGTCGGCTGACCATTAGTAAGGATACCTCAAAA
AATCAAGTGTACTTGCAAATGAATAGCCTTGACGCCGAGGATACGGCTGTATATTATTGCGCGCGGATGGAACTCTG
GTCTTACTACTTTGATTATTGGGGGCAGGGGACTCTCGTCACGGTCTCGAGC
>Sequence ID 217: αCD19 VL Amino Acid Sequence
ENVLTQSPASLSASPGERVTITCSASSSVSYMHWYQQKPGQAPKLWIYDTSKLASGVPSRFSGSGSGNDHTLTISSM
EPEDFATYYCFQGSVYPFTFGQGTKVTVL
>Sequence ID 218: αCD19 VL Nucleotide Sequence
GAAAATGTATTGACACAGAGCCCCGCCTCCCTCAGTGCCTCACCTGGGGAAAGGGTAACTATCACTTGCTCTGCATC
AAGCAGCGTCTCATACATGCATTGGTATCAACAAAAGCCTGGACAGGCCCCCAAGCTCTGGATATACGATACGAGCA
AGCTGGCTTCCGGCGTACCTAGCCGCTTCAGTGGTTCCGGCTCAGGCAACGATCACACCCTTACGATTTCCAGTATG
GAACCCGAAGATTTTGCAACTTATTATTGTTTCCAGGGGAGCGTGTACCCATTCACTTTCGGGCAGGGGACAAAAGT
GACCGTCCTA
>Sequence ID 219: αCD3 VH Amino Acid Sequence
EVQLVESGGGLVQPGGSLRLSCAASGFTISTNAMSWVRQAPGKGLEWIGVITGRDITYYASWAKGRFTISRDNSKNT
LYLQMNSLRAEDTAVYYCARDGGSSAITSNNIWGQGTLVTVSS
>Sequence ID 220: αCD3 VH Nucleotide Sequence
GAGGTGCAGCTGGTGGAGTCTGGGGGAGGCTTGGTCCAGCCTGGGGGGTCCCTGAGACTCTCCTGTGCAGCCTCTGG
ATTCACCATCAGTACCAATGCAATGAGCTGGGTCCGCCAGGCTCCAGGGAAGGGGCTGGAGTGGATCGGAGTCATTA
CTGGTCGTGATATCACATACTACGCGAGCTGGGCGAAAGGCAGATTCACCATCTCCAGAGACAATTCCAAGAACACG
CTGTATCTTCAAATGAACAGCCTGAGAGCCGAGGACACGGCTGTGTATTACTGTGCGAGAGACGGTGGTTCTTCTGC
TATTACTAGTAACAACATTTGGGGCCAGGGAACCCTGGTCACCGTGTCCTCA
>Sequence ID 221: αCD3 VL Amino Acid Sequence
DVVMTQSPSTLSASVGDRVTINCQASESISSWLAWYQQKPGKAPKLLIYEASKLASGVPSRFSGSGSGTEFTLTISS
LQPDDFATYYCQGYFYFISRTYVNSFGGGTKVEIK
>Sequence ID 222: αCD3 VL Nucleotide Sequence
GACGTCGTGATGACCCAGTCTCCTTCCACCCTGTCTGCATCTGTAGGAGACAGAGTCACCATCAATTGCCAAGCCAG
TGAGAGCATTAGCAGTTGGTTAGCCTGGTATCAGCAGAAACCAGGGAAAGCCCCTAAGCTCCTGATCTATGAAGCAT
CCAAACTGGCATCTGGGGTCCCATCAAGGTTCAGCGGCAGTGGATCTGGGACAGAATTCACTCTCACCATCAGCAGC
CTGCAGCCTGATGATTTTGCAACTTATTACTGCCAAGGCTATTTTTATTTTATTAGTCGTACTTATGTAAATTCTTT
CGGCGGAGGGACCAAGGTGGAGATCAAA
>Sequence ID 223: αCD3 VH stapled Amino Acid Sequence
EVQLVESGGGLVQPGGSLRLSCAASGFTISTNAMSWVRQAPGKCLEWIGVITGRDITYYASWAKGRFTISRDNSKNT
LYLQMNSLRAEDTAVYYCARDGGSSAITSNNIWGQGTLVTVSS
>Sequence ID 224: αCD3 VH stapled Nucleotide Sequence
GAGGTGCAGCTGGTGGAGTCTGGGGGAGGCTTGGTCCAGCCTGGGGGGTCCCTGAGACTCTCCTGTGCAGCCTCTGG
ATTCACCATCAGTACCAATGCAATGAGCTGGGTCCGCCAGGCTCCAGGGAAGTGTCTGGAGTGGATCGGAGTCATTA
CTGGTCGTGATATCACATACTACGCGAGCTGGGCGAAAGGCAGATTCACCATCTCCAGAGACAATTCCAAGAACACG
CTGTATCTTCAAATGAACAGCCTGAGAGCCGAGGACACGGCTGTGTATTACTGTGCGAGAGACGGTGGTTCTTCTGC
TATTACTAGTAACAACATTTGGGGCCAGGGAACCCTGGTCACCGTGTCCTCA
>Sequence ID 225: αCD3 VL stapled Amino Acid Sequence
DVVMTQSPSTLSASVGDRVTINCQASESISSWLAWYQQKPGKAPKLLIYEASKLASGVPSRFSGSGSGTEFTLTISS
LQPDDFATYYCQGYFYFISRTYVNSFGCGTKVEIK
>Sequence ID 226: αCD3 VL stapled Nucleotide Sequence
GACGTCGTGATGACCCAGTCTCCTTCCACCCTGTCTGCATCTGTAGGAGACAGAGTCACCATCAATTGCCAAGCCAG
TGAGAGCATTAGCAGTTGGTTAGCCTGGTATCAGCAGAAACCAGGGAAAGCCCCTAAGCTCCTGATCTATGAAGCAT
CCAAACTGGCATCTGGGGTCCCATCAAGGTTCAGCGGCAGTGGATCTGGGACAGAATTCACTCTCACCATCAGCAGC
CTGCAGCCTGATGATTTTGCAACTTATTACTGCCAAGGCTATTTTTATTTTATTAGTCGTACTTATGTAAATTCTTT
CGGCTGTGGGACCAAGGTGGAGATCAAA
>Sequence ID 227: αCD3* VH Amino Acid Sequence
QVQLQESGGRLVQPGEPLSLTCKTSGIDLSSNAIGWVRQAPGKGLEWIGVIFGSGNTYYASWAKGRFTISRSTSTVY
LKMNSLRSEDTAIYYCARGGYSSDIWGQGTLVTVSS
>Sequence ID 228: αCD3* VH Nucleotide Sequence
CAAGTGCAGTTGCAAGAAAGTGGTGGTAGACTGGTTCAGCCTGGTGAACCCTTGTCACTGACGTGTAAAACAAGCGG
CATTGATCTGTCCTCTAACGCCATCGGATGGGTCCGACAGGCCCCAGGAAAAGGTCTGGAGTGGATCGGAGTTATCT
TCGGGAGCGGCAATACATACTACGCAAGCTGGGCAAAAGGGCGATTTACGATATCACGGAGCACCTCTACAGTTTAT
TTGAAAATGAACTCCCTCCGGTCCGAGGATACCGCGATATATTACTGTGCCAGAGGGGGGTACTCCTCTGATATCTG
GGGGCAGGGTACACTGGTTACAGTTTCATCC
>Sequence ID 229: αCD3* VL Amino Acid Sequence
DPQLTQSPSSLSATVGQRVTINCQSSQSVAKNNNLAWFQQKPGKPPKLLIYSASTLAAGVPSRFSGSGSGTQFTLTI
TRVQSEDFATYYCSARDSGNIQSFGGGTRVEIK
>Sequence ID 230: αCD3* VL Nucleotide Sequence
GATCCTCAATTGACCCAGTCCCCTAGTAGCCTTTCTGCAACCGTGGGCCAGAGGGTAACAATCAATTGCCAGTCAAG
CCAGTCCGTAGCGAAGAATAATAATTTGGCATGGTTCCAACAAAAACCGGGTAAACCTCCTAAACTCCTTATCTACT
CAGCTTCAACCCTTGCCGCGGGTGTGCCCAGCCGGTTCTCAGGCTCAGGTTCCGGGACTCAATTTACACTTACCATC
ACTCGCGTCCAAAGTGAGGATTTTGCAACCTACTATTGTTCTGCACGGGATTCCGGGAACATACAGTCCTTTGGGGG
TGGAACTCGGGTGGAGATAAAA
>Sequence ID 231: αCD3** VH Amino Acid Sequence
EVQLVESGGGLVQPGGSLRLSCAASGFTISTNAMSWVRQAPGKGLEWVGVITGRDITYYASWAKGRFTISRDTSKNT
VYLQMNSLRAEDTAVYYCARDGGSSAITSNNIWGQGTLVTVSS
>Sequence ID 232: αCD3** VH Nucleotide Sequence
GAAGTCCAATTGGTAGAAAGTGGCGGTGGTCTGGTGCAACCTGGTGGATCTCTTCGCCTCTCATGCGCCGCTAGTGG
CTTTACTATTTCAACTAATGCGATGAGCTGGGTTCGCCAGGCCCCCGGCAAAGGACTTGAGTGGGTCGGCGTCATCA
CCGGCAGGGACATTACATACTATGCGAGTTGGGCAAAGGGCAGGTTCACGATTAGCCGCGATACTTCAAAGAATACC
GTTTACCTTCAAATGAATAGCTTGAGGGCGGAAGACACAGCTGTGTATTACTGCGCGAGGGATGGAGGTAGTTCCGC
CATAACTTCCAACAACATATGGGGACAAGGCACGCTGGTTACTGTCTCGAGT
>Sequence ID 233: αCD3** VL Amino Acid Sequence
EIVMTQSPSTLSASVGDRVIITCQASESISSWLAWYQQKPGKAPKLLIYEASKLASGVPSRFSGSGSGAEFTLTISS
LQPDDFATYYCQGYFYFISRTYVNSFGQGTKLTVL
>Sequence ID 234: αCD3** VL Nucleotide Sequence
GAAATCGTTATGACGCAGAGTCCCTCCACGCTCTCCGCTAGTGTCGGGGATCGCGTCATTATCACATGCCAGGCCTC
CGAGTCAATCAGCAGCTGGCTTGCATGGTATCAACAGAAGCCGGGAAAAGCTCCTAAATTGCTGATCTATGAAGCGT
CAAAATTGGCGTCTGGTGTCCCATCTAGGTTCTCCGGCTCTGGGTCTGGTGCGGAATTTACTTTGACAATCTCCAGT
CTTCAACCAGACGATTTCGCTACCTACTACTGCCAAGGGTATTTCTATTTTATAAGCCGGACATATGTAAACTCCTT
CGGCCAAGGAACAAAGTTGACTGTTCTT
>Sequence ID 235: αCD3*** VH Amino Acid Sequence
QQLLESGGRLIKPGATLRLTCKTSGFTISTNAMSWVRQPPGKGLEWIGVITGRDITYYASWAKGRFTISKTSINTVF
LQMRSLRAEDTAVYYCARDGGSSAITSNNIWGRGTLVTVSS
>Sequence ID 236: αCD3*** VH Nucleotide Sequence
CAGCAGCTGCTGGAAAGCGGCGGCCGCCTGATTAAACCGGGCGCGACCCTGCGCCTGACCTGCAAAACCAGCGGCTT
TACCATTAGCACCAACGCGATGAGCTGGGTGCGCCAGCCGCCGGGCAAAGGCCTGGAATGGATTGGCGTGATTACCG
GCCGCGATATTACCTATTATGCGAGCTGGGCGAAAGGCCGCTTTACCATTAGCAAAACCAGCATTAACACCGTGTTT
CTGCAGATGCGCAGCCTGCGCGCGGAAGATACCGCGGTGTATTATTGCGCGCGCGATGGCGGCAGCAGCGCGATTAC
CAGCAACAACATTTGGGGCCGCGGCACCCTGGTGACCGTGAGCAGC
>Sequence ID 237: αCD3*** VL Amino Acid Sequence
DVQMTQSPSTLSATVGQRVTINCQASESISSWLAWYQQKPGQPPKLLIYEASKLASGVPSRFSGSGSGTEFTLTISS
LQSDDFATYYCQGYFYFISRTYVNSFGGGTRVEIK
>Sequence ID 238: αCD3*** VL Nucleotide Sequence
GATGTGCAGATGACCCAGAGCCCGAGCACCCTGAGCGCGACCGTGGGCCAGCGCGTGACCATTAACTGCCAGGCGAG
CGAAAGCATTAGCAGCTGGCTGGCGTGGTATCAGCAGAAACCGGGCCAGCCGCCGAAACTGCTGATTTATGAAGCGA
GCAAACTGGCGAGCGGCGTGCCGAGCCGCTTTAGCGGCAGCGGCAGCGGCACCGAATTTACCCTGACCATTAGCAGC
CTGCAGAGCGATGATTTTGCGACCTATTATTGCCAGGGCTATTTTTATTTTATTAGCCGCACCTATGTGAACAGCTT
TGGCGGCGGCACCCGCGTGGAAATTAAA
>Sequence ID 239: αCD3**** VH Amino Acid Sequence
QQLVESGGGLVKPGGSLRLSCAASGFTISTNAMSWVRQAPGKGLEWVGVITGRDITYYASWAKGRFTISKTSKNTVY
LQMNSLRAEDTAVYYCARDGGSSAITSNNIWGQGTLVTVSS
>Sequence ID 240: αCD3**** VH Nucleotide Sequence
CAGCAGCTGGTGGAAAGCGGCGGCGGCCTGGTGAAACCGGGCGGCAGCCTGCGCCTGAGCTGCGCGGCGAGCGGCTT
TACCATTAGCACCAACGCGATGAGCTGGGTGCGCCAGGCGCCGGGCAAAGGCCTGGAATGGGTGGGCGTGATTACCG
GCCGCGATATTACCTATTATGCGAGCTGGGCGAAAGGCCGCTTTACCATTAGCAAAACCAGCAAAAACACCGTGTAT
CTGCAGATGAACAGCCTGCGCGCGGAAGATACCGCGGTGTATTATTGCGCGCGCGATGGCGGCAGCAGCGCGATTAC
CAGCAACAACATTTGGGGCCAGGGCACCCTGGTGACCGTGAGCAGC
>Sequence ID 241: αCD3**** VL Amino Acid Sequence
DVVMTQSPSSLSASVGDRVTISCQASESISSWLAWYQQKPGQAPKLLIYEASKLASGVPSRFSGSGSGTEFTLTISS
LEPEDFATYYCQGYFYFISRTYVNSFGGGTKVEIK
>Sequence ID 242: αCD3**** VL Nucleotide Sequence
GATGTGGTGATGACCCAGAGCCCGAGCAGCCTGAGCGCGAGCGTGGGCGATCGCGTGACCATTAGCTGCCAGGCGAG
CGAAAGCATTAGCAGCTGGCTGGCGTGGTATCAGCAGAAACCGGGCCAGGCGCCGAAACTGCTGATTTATGAAGCGA
GCAAACTGGCGAGCGGCGTGCCGAGCCGCTTTAGCGGCAGCGGCAGCGGCACCGAATTTACCCTGACCATTAGCAGC
CTGGAACCGGAAGATTTTGCGACCTATTATTGCCAGGGCTATTTTTATTTTATTAGCCGCACCTATGTGAACAGCTT
TGGCGGCGGCACCAAAGTGGAAATTAAA
>Sequence ID 243: αPD-L1 VH Amino Acid Sequence
EVQLLESGGGLVQPGGSLSLSCAASGFSFSSGYDMCWVRQAPGKGLEWIACIAAGSAGITYDANWAKGRFTISRDNS
KNTLYLQMNSLRAEDTAVYYCARSAFSFDYAMDLWGQGTLVTVSS
>Sequence ID 244: αPD-L1 VH Nucleotide Sequence
GAAGTGCAATTGCTCGAAAGTGGTGGCGGACTTGTGCAACCTGGTGGAAGCCTCTCACTCTCTTGCGCGGCGAGTGG
TTTTAGCTTCAGTAGCGGCTACGATATGTGCTGGGTAAGACAGGCTCCTGGTAAAGGCCTTGAGTGGATTGCGTGTA
TCGCCGCCGGGTCTGCTGGTATAACATACGATGCAAACTGGGCGAAAGGGCGCTTCACAATCTCCAGGGACAACTCA
AAAAATACATTGTACCTCCAGATGAATAGCCTGAGAGCCGAAGACACCGCAGTCTACTATTGCGCAAGGTCAGCATT
TAGCTTCGATTATGCAATGGATCTTTGGGGCCAGGGGACGCTCGTCACCGTCTCATCTTGA
>Sequence ID 245: αPD-L1 VL Amino Acid Sequence
DIQMTQSPSTLSASVGDRVTITCQASQSISSHLNWYQQKPGKAPKLLIYKASTLASGVPSRFSGSGSGTEFTLTISS
LQPDDFATYYCQQGYSWGNVDNVFGGGTKVTVL
>Sequence ID 246: αPD-L1 VL Nucleotide Sequence
GACATTCAGATGACACAGTCACCGTCTACGCTCTCAGCCTCAGTAGGCGATAGGGTGACTATCACCTGCCAAGCCTC
CCAATCTATAAGTTCACACCTCAACTGGTATCAACAGAAACCCGGTAAAGCACCGAAGCTGCTCATCTACAAGGCAT
CAACTCTTGCCTCAGGTGTGCCTAGTCGCTTCTCCGGGAGCGGCTCCGGTACTGAGTTTACTTTGACGATATCTTCC
CTCCAACCCGACGACTTCGCCACATACTATTGTCAGCAGGGTTATAGTTGGGGAAATGTTGACAATGTGTTTGGAGG
GGGAACGAAAGTGACTGTGTTG
>Sequence ID 247: α4-1BB VH Amino Acid Sequence
EVQLVESGGGLVQPGGSLRLSCTASGFTISSYHMQWVRQAPGKGLEYIGTISSGGNVYYASSARGRFTISRPSSKNT
VDLQMNSLRAEDTAVYYCARDSGYSDPMWGQGTLVTVSS
>Sequence ID 248: α4-1BB VH Nucleotide Sequence
GAGGTTCAGTTGGTTGAAAGTGGGGGGGGACTCGTTCAGCCTGGAGGCTCTTTGCGACTTTCTTGTACCGCTTCTGG
GTTCACTATAAGTTCATATCATATGCAATGGGTAAGACAGGCGCCTGGTAAGGGACTTGAATACATAGGAACAATAA
GCTCTGGTGGTAACGTCTATTACGCCTCATCCGCGCGGGGGAGGTTTACAATTTCCAGGCCTTCTAGCAAAAACACG
GTAGATCTGCAAATGAACTCTCTTCGCGCTGAAGATACAGCAGTCTACTACTGCGCCAGGGATTCAGGGTATTCTGA
CCCCATGTGGGGGCAGGGCACATTGGTTACCGTGTCCTCT
>Sequence ID 249: α4-1BB VL Amino Acid Sequence
DVVMTQSPSSVSASVGDRVTITCQASQNIRTYLSWYQQKPGKAPKLLIYAAANLASGVPSRFSGSGSGTDFTLTISD
LEPGDAATYYCQSTYLGTDYVGGAFGGGTKLTVL
>Sequence ID 250: α4-1BB VL Nucleotide Sequence
GACGTTGTGATGACGCAGTCTCCTAGTTCAGTATCAGCGTCTGTTGGGGATCGAGTCACGATTACATGCCAGGCGAG
CCAAAATATTAGGACGTATCTGTCTTGGTATCAACAAAAGCCTGGTAAGGCTCCAAAACTCCTCATTTACGCCGCTG
CCAACTTGGCTAGTGGAGTACCTTCACGCTTTAGTGGGTCAGGTTCTGGAACAGATTTTACGTTGACGATCTCCGAT
TTGGAACCAGGGGACGCTGCCACGTATTATTGCCAGTCCACCTACCTCGGGACTGACTACGTTGGTGGGGCGTTTGG
CGGAGGAACAAAACTCACTGTACTT
>Sequence ID 251: 41BBL Amino Acid Sequence
REGPELSPDDPAGLLDLRQGMFAQLVAQNVLLIDGPLSWYSDPGLAGVSLTGGLSYKEDTKELVVAKAGVYYVFFQL
ELRRVVAGEGSGSVSLALHLQPLRSAAGAAALALTVDLPPASSEARNSAFGFQGRLLHLSAGQRLGVHLHTEARARH
AWQLTQGATVLGLFRVTPEIPAGLGSTGSGSKPGSGEGSTKGREGPELSPDDPAGLLDLRQGMFAQLVAQNVLLIDG
PLSWYSDPGLAGVSLTGGLSYKEDTKELVVAKAGVYYVFFQLELRRVVAGEGSGSVSLALHLQPLRSAAGAAALALT
VDLPPASSEARNSAFGFQGRLLHLSAGQRLGVHLHTEARARHAWQLTQGATVLGLFRVTPEIPAGLGGGGSGGGGSR
EGPELSPDDPAGLLDLRQGMFAQLVAQNVLLIDGPLSWYSDPGLAGVSLTGGLSYKEDTKELVVAKAGVYYVFFQLE
LRRVVAGEGSGSVSLALHLQPLRSAAGAAALALTVDLPPASSEARNSAFGFQGRLLHLSAGQRLGVHLHTEARARHA
WQLTQGATVLGLFRVTPEIPAGL
>Sequence ID 252: 41BBL Nucleotide Sequence
CGAGAGGGCCCCGAGCTGTCTCCTGATGACCCAGCAGGCCTCTTGGACTTGCGGCAGGGTATGTTCGCTCAACTTGT
GGCTCAGAATGTTCTGCTCATTGATGGACCACTCTCTTGGTATAGTGACCCCGGTCTGGCCGGGGTGAGTCTGACCG
GCGGGCTCTCTTATAAAGAGGATACTAAGGAACTGGTCGTAGCAAAAGCGGGCGTTTATTACGTTTTTTTTCAGCTG
GAGCTCAGGCGCGTGGTGGCCGGCGAGGGCAGTGGCTCTGTGTCCCTGGCCCTGCACTTACAGCCCTTGAGAAGCGC
TGCAGGTGCTGCCGCACTGGCTTTAACTGTTGACCTCCCTCCGGCCTCTTCTGAAGCTAGAAACAGCGCTTTCGGCT
TCCAAGGGCGCCTGCTGCACCTGAGCGCAGGCCAGCGCTTAGGTGTGCACCTTCATACAGAGGCCAGGGCCCGACAC
GCTTGGCAGCTCACACAGGGTGCCACGGTTCTCGGACTTTTCCGCGTTACTCCCGAGATCCCCGCTGGCCTCGGAAG
TACTGGTTCTGGGTCTAAACCCGGTTCCGGCGAAGGTAGTACTAAAGGACGAGAAGGGCCAGAGTTAAGTCCAGATG
ACCCTGCTGGGCTTTTGGACCTGCGGCAGGGCATGTTCGCTCAACTGGTGGCTCAGAACGTGCTGCTGATCGATGGC
CCCCTGAGTTGGTACAGCGATCCCGGGCTGGCAGGCGTGTCACTTACAGGGGGCCTCTCTTACAAGGAAGACACCAA
GGAGTTAGTGGTCGCTAAGGCTGGCGTGTATTACGTGTTCTTCCAACTGGAGCTGAGAAGGGTTGTGGCAGGAGAGG
GTAGCGGCAGCGTGTCTTTAGCCCTTCACTTGCAGCCCCTGAGGTCTGCTGCAGGTGCAGCCGCTCTCGCGCTCACC
GTGGATCTCCCCCCAGCCTCATCTGAAGCTAGGAACAGTGCATTTGGCTTTCAGGGACGCTTGCTGCACCTCTCCGC
TGGACAGAGGCTGGGCGTGCACCTTCACACAGAGGCCCGTGCCAGGCATGCATGGCAGCTCACTCAGGGGGCAACAG
TGCTGGGTCTCTTCCGCGTGACTCCTGAAATACCAGCTGGACTTGGCGGTGGAGGCAGCGGCGGAGGAGGATCTCGT
GAGGGGCCAGAACTGTCCCCCGATGACCCAGCCGGACTGCTCGATCTCAGACAGGGCATGTTCGCTCAGCTTGTAGC
CCAAAATGTCCTCCTGATTGACGGCCCTTTGAGCTGGTATAGTGATCCCGGCTTGGCCGGGGTATCTCTGACCGGAG
GCCTCTCCTACAAGGAAGACACCAAAGAGCTGGTGGTGGCAAAAGCGGGGGTGTATTATGTGTTCTTTCAGCTCGAG
CTGCGGAGAGTTGTGGCCGGGGAAGGGTCTGGGAGCGTATCTCTTGCACTTCACCTGCAGCCCCTGCGCAGCGCCGC
TGGAGCCGCCGCCCTTGCTCTTACTGTGGATCTGCCTCCTGCTTCCTCAGAAGCACGCAACAGCGCCTTCGGCTTTC
AAGGACGTCTCCTGCACTTGTCCGCAGGACAGAGGTTGGGCGTCCATTTACACACTGAGGCACGGGCACGGCACGCT
TGGCAGCTTACCCAGGGAGCCACCGTGCTGGGACTCTTTAGAGTGACACCCGAGATCCCCGCTGGCTTGTGA
>Sequence ID 253: NKG2D dimer Amino Acid Sequence
FLNSLFNQEVQIPLTESYCGPCPKNWICYKNNCYQFFDESKNWYESQASCMSQNASLLKVYSKEDQDLLKLVKSYHW
MGLVHIPTNGSWQWEDGSILSPNLLTIIEMQKGDCALYASSFKGYIENCSTPNTYICMQRTVGGGGSGGGGSGGGGS
GGGGSFLNSLFNQEVQIPLTESYCGPCPKNWICYKNNCYQFFDESKNWYESQASCMSQNASLLKVYSKEDQDLLKLV
KSYHWMGLVHIPTNGSWQWEDGSILSPNLLTIIEMQKGDCALYASSFKGYIENCSTPNTYICMQRTV
>Sequence ID 254: NKG2D dimer Nucleotide Sequence
TTTCTTAATTCCCTTTTCAACCAAGAGGTTCAGATCCCCTTGACTGAAAGCTATTGCGGCCCTTGTCCGAAAAACTG
GATATGTTACAAGAATAATTGTTACCAATTCTTCGACGAAAGCAAGAACTGGTATGAGAGTCAGGCGTCTTGTATGA
GTCAGAATGCCAGCCTGCTTAAGGTTTATTCAAAAGAAGACCAGGATCTGCTTAAGTTGGTAAAGAGCTACCACTGG
ATGGGGCTGGTACATATCCCAACGAATGGGTCATGGCAGTGGGAGGACGGTTCTATTCTGAGTCCAAATCTCCTGAC
GATCATCGAAATGCAGAAAGGGGACTGTGCCCTGTATGCATCATCCTTCAAGGGGTACATCGAGAACTGCAGTACCC
CAAATACCTACATTTGTATGCAAAGAACGGTTGGAGGCGGTGGCTCAGGCGGAGGCGGCTCAGGAGGTGGCGGTTCA
GGAGGCGGCGGATCTTTCCTAAACTCATTATTCAACCAAGAAGTTCAAATTCCCTTGACCGAAAGTTACTGTGGCCC
ATGTCCTAAAAACTGGATATGTTACAAAAATAACTGCTACCAATTTTTTGATGAGAGTAAAAACTGGTATGAGAGCC
AGGCTTCTTGTATGTCTCAAAATGCCAGCCTTCTGAAAGTATACAGCAAAGAGGACCAGGATTTACTTAAACTGGTG
AAGTCATATCATTGGATGGGACTAGTACACATTCCAACAAATGGATCTTGGCAGTGGGAAGATGGCTCCATTCTCTC
ACCCAACCTACTAACAATAATTGAAATGCAGAAGGGAGACTGTGCACTCTATGCCTCGAGCTTTAAAGGCTATATAG
AAAACTGTTCAACTCCAAATACGTACATCTGCATGCAAAGGACTGTG
>Sequence ID 255: αHER3 VH Amino Acid Sequence
QVQLQESGGGLVKPGGSLSLSCAASGFTFSSYWMSWVRQAPGKGLEWVANINRDGSASYYVDSVKGRFTISRDDAKN
SLYLQMNSLRAEDTAVYYCARDRGVGYFDLWGRGTLVTVSS
>Sequence ID 256: αHER3 VH Nucleotide Sequence
CAGGTGCAATTGCAGGAGTCGGGGGGAGGCCTGGTCAAGCCTGGAGGGTCCCTGAGCCTCTCCTGTGCAGCCTCTGG
ATTCACCTTTAGTAGTTATTGGATGAGCTGGGTCCGCCAGGCTCCAGGGAAGGGGCTGGAGTGGGTGGCCAACATAA
ACCGCGATGGAAGTGCGAGTTACTATGTGGACTCTGTGAAGGGCCGATTCACCATCTCCAGAGACGACGCCAAGAAC
TCACTGTATCTGCAAATGAACAGCCTGAGAGCTGAGGACACGGCTGTGTATTACTGTGCGAGAGATCGTGGGGTGGG
CTACTTCGATCTCTGGGGCCGTGGCACCCTGGTCACCGTCTCGAGT
>Sequence ID 257: αHER3 VL Amino Acid Sequence
QSALTQPASVSGSPGQSITISCTGTSSDVGGYNFVSWYQQHPGKAPKLMIYDVSDRPSGVSDRFSGSKSGNTASLII
SGLQADDEADYYCSSYGSSSTHVIFGGGTKVTVL
>Sequence ID 258: αHER3 VL Nucleotide Sequence
CAGTCTGCCCTGACTCAGCCTGCCTCCGTGTCTGGGTCTCCTGGACAGTCGATCACCATCTCCTGCACTGGAACCAG
CAGTGACGTTGGTGGTTATAACTTTGTCTCCTGGTACCAACAACACCCAGGCAAAGCCCCCAAACTCATGATCTATG
ATGTCAGTGATCGGCCCTCAGGGGTGTCTGATCGCTTCTCCGGCTCCAAGTCTGGCAACACGGCCTCCCTGATCATC
TCTGGCCTCCAGGCTGACGACGAGGCTGATTATTACTGCAGCTCATATGGGAGCAGCAGCACTCATGTGATTTTCGG
CGGAGGGACCAAGGTGACCGTCCTA
>Sequence ID 259: αCD20 VH Amino Acid Sequence
QVQLQQPGAELVKPGASVKMSCKASGYTFTSYNMHWVKQTPGRGLEWIGAIYPGNGDTSYNQKFKGKATLTADKSSS
TAYMQLSSLTSEDSAVYYCARSTYYGGDWYFNVWGAGTTVTVSS
>Sequence ID 260: αCD20 VH Nucleotide Sequence
CAGGTGCAGCTGCAGCAGCCCGGCGCCGAGCTGGTGAAGCCCGGCGCCAGCGTGAAGATGAGCTGCAAGGCCAGCGG
CTACACCTTCACCAGCTACAACATGCACTGGGTGAAGCAGACCCCCGGCCGGGGCCTGGAGTGGATCGGCGCCATCT
ACCCCGGCAACGGCGACACCAGCTACAACCAGAAGTTCAAGGGCAAGGCCACCCTGACCGCCGACAAGAGCAGCAGC
ACCGCCTACATGCAGCTGAGCAGCCTGACCAGCGAGGACAGCGCCGTGTACTACTGCGCCCGGAGCACCTACTACGG
CGGCGACTGGTACTTCAACGTGTGGGGCGCCGGCACCACCGTGACCGTCTCGAGC
>Sequence ID 261: αCD20 VL Amino Acid Sequence
QIVLSQSPAILSASPGEKVTMTCRASSSVSYIHWFQQKPGSSPKPWIYATSNLASGVPVRFSGSGSGTSYSLTISRV
EAEDAATYYCQQWTSNPPTFGGGTKLTVL
>Sequence ID 262: αCD20 VL Nucleotide Sequence
CAGATCGTGCTGAGCCAGAGCCCCGCCATCCTGAGCGCCAGCCCCGGCGAGAAGGTGACCATGACCTGCCGGGCCAG
CAGCAGCGTGAGCTACATCCACTGGTTCCAGCAGAAGCCCGGCAGCAGCCCCAAGCCCTGGATCTACGCCACCAGCA
ACCTGGCCAGCGGCGTGCCCGTGCGGTTCAGCGGCAGCGGCAGCGGCACCAGCTACAGCCTGACCATCAGCCGGGTG
GAGGCCGAGGACGCCGCCACCTACTACTGCCAGCAGTGGACCAGCAACCCCCCCACCTTCGGCGGCGGCACCAAGCT
GACCGTGCTG
>Sequence ID 263: EGFR VHH Amino Acid Sequence
EVQLQESGGGLVQAGDSLSLSCLVSGRSFNSYTMGWFRQAPGKEREFVAAILWSGPTTYYADSVKGRFTISRDNAKN
TVYLQMNSLKPEDTAVYYCAAALGVLVLAPGNVYSYWGQGTQVTVSS
>Sequence ID 264: EGFR VHH Nucleotide Sequence
GAGGTGCAGCTGCAGGAGTCTGGCGGCGGCCTGGTGCAGGCTGGGGACAGCCTGAGCCTGTCCTGCCTGGTGTCTGG
CCGCTCCTTCAACTCCTACACCATGGGCTGGTTCCGCCAGGCCCCTGGGAAGGAGCGGGAGTTTGTGGCTGCCATCC
TGTGGAGTGGCCCCACCACCTACTATGCTGACTCTGTGAAGGGCCGCTTCACCATCTCCAGAGACAATGCCAAGAAC
ACTGTGTACCTGCAGATGAACAGCCTGAAGCCAGAGGACACAGCTGTGTACTACTGTGCTGCTGCCCTGGGAGTGCT
GGTGCTGGCCCCTGGCAATGTGTACAGCTACTGGGGCCAGGGCACCCAGGTGACTGTCTCGAGC
>Sequence ID 265: HER3 VHH Amino Acid Sequence
QVQLVQSGGGLVQAGGSLSLSCAFSGRTFSMYTMGWFRQAPGKEREFVAANRGRGLSPDIADSVNGRFTISRDNAKN
TLYLQMDSLKPEDTAVYYCAADLQYGSSWPQRSSAEYDYWGQGTTVTVSS
>Sequence ID 266: HER3 VHH Nucleotide Sequence
CAGGTGCAGCTGGTGCAGTCTGGCGGAGGCCTGGTGCAGGCTGGGGGCAGCCTGAGCCTGAGCTGTGCCTTCTCTGG
CCGCACCTTCTCCATGTACACCATGGGCTGGTTCCGCCAGGCCCCAGGGAAGGAGAGAGAGTTTGTGGCTGCCAACA
GAGGCAGAGGCCTGAGCCCAGACATTGCTGACTCTGTGAATGGCCGCTTCACCATCTCCAGAGACAATGCCAAGAAC
ACCCTGTACCTGCAGATGGACAGCCTGAAGCCAGAGGACACAGCTGTGTACTACTGTGCTGCTGACCTGCAGTATGG
CAGCAGCTGGCCTCAGAGGAGCTCTGCTGAGTATGACTACTGGGGCCAGGGCACCACTGTGACTGTCTCGAGC
>Sequence ID 267: αPD-L1 Stapled VH Amino Acid Sequence
EVQLLESGGGLVQPGGSLRLSCAASGFSFSSGYDMCWVRQAPGKCLEWIACIAAGSAGITYDANWAKGRFTISRDNS
KNTLYLQMNSLRAEDTAVYYCARSAFSFDYAMDLWGQGTLVTVSS
>Sequence ID 268: αPD-L1 Stapled VH Nucleotide Sequence
GAGGTGCAGCTGTTGGAGTCTGGGGGAGGCTTGGTACAGCCTGGGGGGTCCCTGAGACTCTCCTGTGCAGCCTCTGG
ATTCTCCTTCAGTAGCGGGTACGACATGTGCTGGGTCCGCCAGGCTCCAGGGAAGTGCCTGGAGTGGATCGCATGCA
TTGCTGCTGGTAGTGCTGGTATCACTTACGACGCGAACTGGGCGAAAGGCCGGTTCACCATCTCCAGAGACAATTCC
AAGAACACGCTGTATCTGCAAATGAACAGCCTGAGAGCCGAGGACACGGCCGTATATTACTGTGCGAGATCGGCGTT
TTCGTTCGACTACGCCATGGACCTCTGGGGCCAGGGAACCCTGGTCACCGTCTCGTCT
>Sequence ID 269: αPD-L1 Stapled VL Amino Acid Sequence
DIQMTQSPSTLSASVGDRVTITCQASQSISSHLNWYQQKPGKAPKLLIYKASTLASGVPSRFSGSGSGTEFTLTISS
LQPDDFATYYCQQGYSWGNVDNVFGCGTKVEIK
>Sequence ID 270: αPD-L1 Stapled VL Nucleotide Sequence
GACATCCAGATGACCCAGTCTCCTTCCACCCTGTCTGCATCTGTAGGAGACAGAGTCACCATCACTTGCCAGGCCAG
TCAGAGCATTAGTTCCCACTTAAACTGGTATCAGCAGAAACCAGGGAAAGCCCCTAAGCTCCTGATCTATAAGGCAT
CCACTCTGGCATCTGGGGTCCCATCAAGGTTCAGCGGCAGTGGATCTGGGACAGAATTTACTCTCACCATCAGCAGC
CTGCAGCCTGATGATTTTGCAACTTATTACTGCCAACAGGGTTATAGTTGGGGTAATGTTGATAATGTTTTCGGCTG
CGGGACCAAGGTGGAGATCAAATAG
>Sequence ID 271: α4-1BB VH Stapled Amino Acid Sequence
RSLVESGGGLVQPGGSLRLSCTASGFTISSYHMQWVRQAPGKCLEYIGTISSGGNVYYASSARGRFTISRPSSKNTV
DLQMNSLRAEDTAVYYCARDSGYSDPMWGQGTLVTVSS
>Sequence ID 272: α4-1BB VH Stapled Nucleotide Sequence
CGGTCGCTGGTGGAGTCTGGGGGAGGCTTGGTCCAGCCTGGGGGGTCCCTGAGACTCTCCTGTACTGCCTCTGGATT
CACCATCAGTAGCTACCACATGCAGTGGGTCCGGCAGGCACCTGGGAAGTGCCTGGAGTACATCGGAACCATTAGTA
GTGGTGGTAATGTATACTACGCAAGCTCCGCTAGAGGCAGATTCACCATCTCCAGACCCTCGTCCAAGAACACGGTG
GATCTTCAAATGAACAGCCTGAGAGCCGAGGACACGGCTGTGTATTACTGTGCGAGAGACTCTGGTTATAGTGATCC
TATGTGGGGCCAGGGAACCCTGGTCACCGTCTCTTCA
>Sequence ID 273: α4-1BB VL Stapled Amino Acid Sequence
DVVMTQSPSSVSASVGDRVTITCQASQNIRTYLSWYQQKPGKAPKLLIYAAANLASGVPSRFSGSGSGTDFTLTISD
LEPGDAATYYCQSTYLGTDYVGGAFGCGTKVEIK
>Sequence ID 274: α4-1BB VL Stapled Nucleotide Sequence
GACGTTGTGATGACCCAGTCTCCATCTTCCGTGTCTGCATCTGTAGGAGACAGAGTCACCATCACCTGTCAGGCCAG
TCAGAACATTAGGACTTACTTATCCTGGTATCAGCAGAAACCAGGGAAAGCCCCTAAGCTCCTGATCTATGCTGCAG
CCAATCTGGCATCTGGGGTCCCATCAAGGTTCAGCGGCAGTGGATCTGGGACAGATTTCACTCTCACCATCAGCGAC
TTGGAACCTGGCGATGCTGCAACTTACTATTGTCAGTCTACCTATCTTGGTACTGATTATGTTGGCGGTGCTTTCGG
CTGTGGGACCAAGGTGGAGATCAAATGA
>Sequence ID 275: αHer3 VH Stapled Amino Acid Sequence
QVQLQESGGGLVKPGGSLRLSCAASGFTFSSYWMSWVRQAPGKCLEWVANINRDGSASYYVDSVKGRFTISRDDAKN
SLYLQMNSLRAEDTAVYYCARDRGVGYFDLWGRGTLVTVST
>Sequence ID 276: αHer3 VH Stapled Nucleotide Sequence
CAGGTGCAATTGCAGGAGTCGGGGGGAGGCCTGGTCAAGCCTGGAGGGTCCCTGAGACTCTCCTGTGCAGCCTCTGG
ATTCACCTTTAGTAGTTATTGGATGAGCTGGGTCCGCCAGGCTCCAGGGAAGTGCCTGGAGTGGGTGGCCAACATAA
ACCGCGATGGAAGTGCGAGTTACTATGTGGACTCTGTGAAGGGCCGATTCACCATCTCCAGAGACGACGCCAAGAAC
TCACTGTATCTGCAAATGAACAGCCTGAGAGCTGAGGACACGGCTGTGTATTACTGTGCGAGAGATCGTGGGGTGGG
CTACTTCGATCTCTGGGGCCGTGGCACCCTGGTCACCGTGTCGACA
>Sequence ID 277: αHer3 VL Stapled Amino Acid Sequence
QSALTQPASVSGSPGQSITISCTGTSSDVGGYNFVSWYQQHPGKAPKLMIYDVSDRPSGVSDRFSGSKSGNTASLII
SGLQADDEADYYCSSYGSSSTHVIFGCGTKVTVL
>Sequence ID 278: αHer3 VL Stapled Nucleotide Sequence
CAGTCTGCCCTGACTCAGCCTGCCTCCGTGTCTGGGTCTCCTGGACAGTCGATCACCATCTCCTGCACTGGAACCAG
CAGTGACGTTGGTGGTTATAACTTTGTCTCCTGGTACCAACAACACCCAGGCAAAGCCCCCAAACTCATGATCTATG
ATGTCAGTGATCGGCCCTCAGGGGTGTCTGATCGCTTCTCCGGCTCCAAGTCTGGCAACACGGCCTCCCTGATCATC
TCTGGCCTCCAGGCTGACGACGAGGCTGATTATTACTGCAGCTCATATGGGAGCAGCAGCACTCATGTGATTTTCGG
CTGTGGGACCAAGGTGACCGTCCTA
>Sequence ID 279: αCEA 656E11 VH Amino Acid Sequence
EVQLVESGGGLVQPGGSLRLSCAASGFSFSGTQYVCWVRQAPGKGLEWIGCIYVDVANTYYATSVKGRFTISRDNSK
NTLYLQMNSLRAEDTAVYYCASHDTVCAGCGLDLWGQGTLVTVSS
>Sequence ID 280: αCEA 656E11 VH Nucleotide Sequence
GAGGTGCAGCTGGTGGAGTCTGGGGGAGGCTTGGTCCAGCCTGGGGGGTCCCTGAGACTCTCCTGTGCAGCCTCTGG
ATTCTCCTTCAGTGGCACCCAGTACGTGTGCTGGGTCCGCCAGGCTCCAGGGAAGGGGCTGGAGTGGATCGGATGCA
TTTATGTGGATGTGGCTAACACTTACTACGCGACCTCCGTGAAGGGCAGATTCACCATCTCCAGAGACAATTCCAAG
AACACGCTGTATCTTCAAATGAACAGCCTGAGAGCCGAGGACACGGCTGTGTATTACTGTGCGAGTCATGATACTGT
TTGTGCTGGTTGTGGTTTGGACTTGTGGGGCCAGGGAACCCTGGTCACCGTCTCGAGC
>Sequence ID 281: αCEA 656E11 VL Amino Acid Sequence
DIQMTQSPSTLSASVGDRVTITCQASENIYSNLAWYQQKPGKAPKLLIYDASTLASGVPSRFSGSGSGTEFTLTISS
LQPDDFATYYCQSTYYNNIIYGAAFGGGTKVEIK
>Sequence ID 282: αCEA 656E11 VL Nucleotide Sequence
GACATCCAGATGACCCAGTCTCCTTCCACCCTGTCTGCATCTGTAGGAGACAGAGTCACCATCACTTGCCAGGCCAG
TGAGAACATTTACAGCAATTTAGCCTGGTATCAGCAGAAACCAGGGAAAGCCCCTAAGCTCCTGATCTATGATGCTT
CCACTCTGGCATCTGGGGTCCCATCAAGGTTCAGCGGCAGTGGATCTGGGACAGAATTCACTCTCACCATCAGCAGC
CTGCAGCCTGATGATTTTGCAACTTATTACTGCCAATCTACTTATTATAATAATATCATTTATGGGGCTGCTTTCGG
CGGAGGGACCAAGGTGGAGATCAAA
>Sequence ID 283: αHER2 VH Amino Acid Sequence
EVQLVESGGGLVQPGGSLRLSCAASGFNIKDTYIHWVRQAPGKGLEWVARIYPTNGYTRYADSVKGRFTISADTSKN
TAYLQMNSLRAEDTAVYYCSRWGGDGFYAMDYWGQGTLVTVST
>Sequence ID 284: αHER2 VH Nucleotide Sequence
GAAGTACAGCTTGTTGAGAGTGGTGGTGGACTTGTCCAACCAGGGGGAAGTCTGCGGCTGTCATGCGCAGCCTCTGG
CTTCAACATTAAGGACACCTACATTCACTGGGTTCGGCAAGCGCCGGGGAAGGGGCTGGAATGGGTCGCCAGGATAT
ACCCTACCAACGGGTACACCAGGTATGCAGATAGCGTTAAGGGTAGATTCACTATTTCAGCTGACACTAGCAAGAAC
ACCGCGTATCTCCAGATGAACTCCCTTCGCGCCGAGGATACGGCTGTGTACTACTGCTCTAGGTGGGGAGGAGATGG
GTTTTACGCAATGGATTACTGGGGACAGGGAACACTCGTTACGGTGTCGACA
>Sequence ID 285: αHER2 VL Amino Acid Sequence
[sequence omitted]
>Sequence ID 286: αHER2 VL Nucleotide Sequence
GACATCCAAATGACGCAGTCTCCCTCCAGTTTGAGTGCAAGTGTGGGAGACAGAGTTACGATCACATGTAGGGCAAG
TCAGGACGTCAATACAGCCGTCGCATGGTACCAGCAGAAGCCTGGAAAGGCCCCGAAACTTCTGATTTACTCTGCAA
GTTTCCTCTACAGTGGTGTTCCTAGTCGCTTCAGTGGGTCTCGGTCAGGCACCGATTTTACCCTGACAATTAGCAGC
TTGCAACCGGAAGATTTTGCGACCTATTATTGCCAGCAACATTATACCACCCCTCCCACATTTGGACAAGGCACGAA
GGTAGAGATTAAA
>Sequence ID 287: SI-20C14 (anti-CEA 656E11) Heavy Chain Amino Acid Sequence
EVQLVESGGGLVQPGGSLRLSCAASGFSFSGTQYVCWVRQAPGKGLEWIGCIYVDVANTYYATSVKGRFTISRDNSK
NTLYLQMNSLRAEDTAVYYCASHDTVCAGCGLDLWGQGTLVTVSSASTKGPSVFPLAPSSKSTSGGTAALGCLVKDY
FPEPVTVSWNSGALTSGVHTFPAVLQSSGLYSLSSVVTVPSSSLGTQTYICNVNHKPSNTKVDKRVEPKSCDKTHTC
PPCPAPEAAGAPSVFLFPPKPKDTLMISRTPEVTCVVVDVSHEDPEVKFNWYVDGVEVHNAKTKPREEQYNSTYRVV
SVLTVLHQDWLNGKEYKCAVSNKALPAPIEKTISKAKGQPREPQVYTLPPSRDELTKNQVSLTCLVKGFYPSDIAVE
WESNGQPENNYKTTPPVLDSDGSFFLYSKLTVDKSRWQQGNVFSCSVMHEALHNHYTQKSLSLSPG
>Sequence ID 288: SI-20C14 (anti-CEA 656E11) Heavy Chain Nucleotide Sequence
GAGGTGCAGCTGGTGGAGTCTGGGGGAGGCTTGGTCCAGCCTGGGGGGTCCCTGAGACTCTCCTGTGCAGCCTCTGG
ATTCTCCTTCAGTGGCACCCAGTACGTGTGCTGGGTCCGCCAGGCTCCAGGGAAGGGGCTGGAGTGGATCGGATGCA
TTTATGTGGATGTGGCTAACACTTACTACGCGACCTCCGTGAAGGGCAGATTCACCATCTCCAGAGACAATTCCAAG
AACACGCTGTATCTTCAAATGAACAGCCTGAGAGCCGAGGACACGGCTGTGTATTACTGTGCGAGTCATGATACTGT
TTGTGCTGGTTGTGGTTTGGACTTGTGGGGCCAGGGAACCCTGGTCACCGTCTCGAGCGCTAGCACCAAGGGCCCAT
CGGTCTTCCCCCTGGCACCCTCCTCCAAGAGCACCTCTGGGGGCACAGCGGCCCTGGGCTGCCTGGTCAAGGACTAC
TTCCCCGAACCGGTGACGGTGTCGTGGAACTCAGGCGCCCTGACCAGCGGCGTGCACACCTTCCCGGCTGTCCTACA
GTCCTCAGGACTCTACTCCCTCAGCAGCGTGGTGACCGTGCCCTCCAGCAGCTTGGGCACCCAGACCTACATCTGCA
ACGTGAATCACAAGCCCAGCAACACCAAGGTGGACAAGAGAGTTGAGCCCAAATCTTGTGACAAAACTCACACATGC
CCACCGTGCCCAGCACCTGAAGCCGCGGGGGCACCGTCAGTCTTCCTCTTCCCCCCAAAACCCAAGGACACCCTCAT
GATCTCCCGGACCCCTGAGGTCACATGCGTGGTGGTGGACGTGAGCCACGAAGACCCTGAGGTCAAGTTCAACTGGT
ACGTGGACGGCGTGGAGGTGCATAATGCCAAGACAAAGCCGCGGGAGGAGCAGTACAACAGCACGTACCGTGTGGTC
AGCGTCCTCACCGTCCTGCACCAGGACTGGCTGAATGGCAAGGAGTACAAGTGCGCGGTCTCCAACAAAGCCCTCCC
AGCCCCCATCGAGAAAACCATCTCCAAAGCCAAAGGGCAGCCCCGAGAACCACAGGTGTACACCCTGCCCCCATCCC
GGGATGAGCTGACCAAGAACCAGGTCAGCCTGACCTGCCTGGTCAAAGGCTTCTATCCCAGCGACATCGCCGTGGAG
TGGGAGAGCAATGGGCAGCCGGAGAACAACTACAAGACCACGCCTCCCGTGCTGGACTCCGACGGCTCCTTCTTCCT
CTATAGCAAGCTCACCGTGGACAAGAGCAGGTGGCAGCAGGGGAACGTCTTCTCATGCTCCGTGATGCATGAGGCTC
TGCACAACCACTACACGCAGAAGAGCCTCTCCCTGTCTCCGGGTTAA
>Sequence ID 289: SI-20C14 (anti-CEA 656E11) Light Chain Amino Acid Sequence
DIQMTQSPSTLSASVGDRVTITCQASENIYSNLAWYQQKPGKAPKLLIYDASTLASGVPSRFSGSGSGTEFTLTISS
LQPDDFATYYCQSTYYNNIIYGAAFGGGTKVEIKRTVAAPSVFIFPPSDEQLKSGTASVVCLLNNFYPREAKVQWKV
DNALQSGNSQESVTEQDSKDSTYSLSSTLTLSKADYEKHKVYACEVTHQGLSSPVTKSFNRGEC
>Sequence ID 290: SI-20C14 (anti-CEA 656E11) Light Chain Nucleotide Sequence
GACATCCAGATGACCCAGTCTCCTTCCACCCTGTCTGCATCTGTAGGAGACAGAGTCACCATCACTTGCCAGGCCAG
TGAGAACATTTACAGCAATTTAGCCTGGTATCAGCAGAAACCAGGGAAAGCCCCTAAGCTCCTGATCTATGATGCTT
CCACTCTGGCATCTGGGGTCCCATCAAGGTTCAGCGGCAGTGGATCTGGGACAGAATTCACTCTCACCATCAGCAGC
CTGCAGCCTGATGATTTTGCAACTTATTACTGCCAATCTACTTATTATAATAATATCATTTATGGGGCTGCTTTCGG
CGGAGGGACCAAGGTGGAGATCAAACGTACGGTGGCTGCACCATCTGTCTTCATCTTCCCGCCATCTGATGAGCAGT
TGAAATCTGGAACTGCCTCTGTTGTGTGCCTGCTGAATAACTTCTATCCCAGAGAGGCCAAAGTACAGTGGAAGGTG
GATAACGCCCTCCAATCGGGTAACTCCCAGGAGAGTGTCACAGAGCAGGACAGCAAGGACAGCACCTACAGCCTCAG
CAGCACCCTGACGCTGAGCAAAGCAGACTACGAGAAACACAAAGTCTACGCCTGCGAAGTCACCCATCAGGGCCTGA
GCTCGCCCGTCACAAAGAGCTTCAACAGGGGAGAGTGTTAG
>Sequence ID 291: αCD3***** VH Amino Acid Sequence
QQLVESGGGLVKPGGSLRLSCAASGIDLSSNAIGWVRQAPGKGLEWVGVIFGSGNTYYASWAKGRFTISRSKNTVYL
QMNSLRAEDTAVYYCARGGYSSDIWGQGTLVTVSS
>Sequence ID 292: αCD3***** VH Nucleotide Sequence
CAACAGTTGGTTGAGTCTGGTGGCGGTCTCGTTAAGCCTGGAGGGTCCCTTCGGCTTAGTTGTGCGGCCTCTGGGAT
CGACCTGTCTAGCAACGCTATAGGATGGGTACGGCAAGCTCCGGGCAAAGGCCTTGAGTGGGTCGGCGTTATTTTTG
GGAGCGGTAATACGTACTACGCCAGCTGGGCAAAAGGTAGGTTCACTATCAGTCGATCAAAGAACACGGTATATCTT
CAGATGAACAGTCTCCGGGCGGAGGACACCGCGGTTTATTATTGCGCAAGGGGGGGATACTCCTCAGACATATGGGG
CCAAGGTACTTTGGTGACGGTCTCGAGC
>Sequence ID 293: αCD3***** VL Amino Acid Sequence
DPVLTQSPSSLSASVGDRVTISCQSSQSVAKNNNLAWFQQKPGQAPKLLIYSASTLAAGVPSRFSGSGSGTDFTLTI
SSVQPEDFATYYCSARDSGNIQSFGGGTKVEIK
>Sequence ID 294: αCD3***** VL Nucleotide Sequence
GATCCAGTTCTGACACAAAGTCCATCCAGCCTGTCTGCCTCAGTCGGCGACAGAGTGACCATCAGTTGCCAGAGCTC
ACAGTCTGTGGCTAAGAACAACAACTTGGCGTGGTTCCAACAGAAACCTGGACAGGCTCCGAAATTGCTGATCTATT
CTGCTTCCACGCTTGCTGCTGGTGTTCCTTCCCGCTTTTCAGGTAGTGGTAGCGGGACAGACTTCACTTTGACTATA
AGCAGCGTGCAGCCTGAAGATTTTGCGACCTACTATTGTTCTGCTAGAGACAGTGGAAATATTCAGTCCTTTGGGGG
GGGAACGAAGGTCGAAATAAAG
>Sequence ID 295: NKG2D Monomer Amino Acid Sequence
FLNSLFNQEVQIPLTESYCGPCPKNWICYKNNCYQFFDESKNWYESQASCMSQNASLLKVYSKEDQDLLKLVKSYHW
MGLVHIPTNGSWQWEDGSILSPNLLTIIEMQKGDCALYASSFKGYIENCSTPNTYICMQRTV
>Sequence ID 296: NKG2D Monomer Nucleotide Sequence
TTTCTGAATAGCCTGTTCAACCAGGAGGTGCAGATCCCACTGACCGAGAGCTATTGTGGACCTTGTCCTAAGAACTG
GATCTGTTACAAGAACAACTGCTACCAGTTCTTCGACGAGAGCAAGAATTGGTATGAAAGCCAGGCCAGCTGCATGA
GCCAAAACGCCTCTCTGCTGAAGGTGTACTCCAAAGAAGATCAGGACCTGCTGAAGCTGGTGAAGTCCTACCACTGG
ATGGGCCTGGTGCACATCCCAACCAACGGCAGCTGGCAGTGGGAAGACGGCAGCATCCTGAGCCCTAACCTGCTGAC
AATCATTGAGATGCAGAAAGGCGACTGCGCCCTGTACGCCAGTTCTTTTAAGGGCTACATCGAAAACTGTAGCACCC
CTAACACCTACATCTGCATGCAGAGAACAGTG
>Sequence ID 297: SI-75XM9 chain A amino acid sequence
QVQLQESGGRLVQPGEPLSLTCKTSGIDLSSNAIGWVRQAPGKGLEWIGVIFGSGNTYYASWAKGRFTISRSTSTVY
LKMNSLRSEDTAIYYCARGGYSSDIWGQGTLVTVSSASTKGPSVFPLAPCSRSTSESTAALGCLVKDYFPEPVTVSW
NSGALTSGVHTFPAVLQSSGLYSLSSVVTVPSSSLGTKTYTCNVDHKPSNTKVDKRVESKYGPPCPPCPAPEAAGGP
SVFLFPPKPKDTLMISRTPEVTCVVVDVSQEDPEVQFNWYVDGVEVHNAKTKPREEQFNSTYRVVSVLTVLHQDWLN
GKEYKCKVSNKGLPSSIEKTISKAKGQPREPQVYTLPPSQEEMTKNQVSLSCAVKGFYPSDIAVEWESNGQPENNYK
TTPPVLDSDGSFFLVSRLTVDKSRWQEGNVFSCSVMHEALHNHYTQKSLSLSLG
>Sequence ID 298: SI-75XM9 chain A nucleotide sequence
CAAGTGCAGTTGCAAGAAAGTGGTGGTAGACTGGTTCAGCCTGGTGAACCCTTGTCACTGACGTGTAAAACAAGCGG
CATTGATCTGTCCTCTAACGCCATCGGATGGGTCCGACAGGCCCCAGGAAAAGGTCTGGAGTGGATCGGAGTTATCT
TCGGGAGCGGCAATACATACTACGCAAGCTGGGCAAAAGGGCGATTTACGATATCACGGAGCACCTCTACAGTTTAT
TTGAAAATGAACTCCCTCCGGTCCGAGGATACCGCGATATATTACTGTGCCAGAGGGGGGTACTCCTCTGATATCTG
GGGGCAGGGTACACTGGTTACAGTTTCATCCGCTAGCACCAAGGGACCCTCTGTGTTTCCTCTGGCTCCTTGCTCCA
GATCCACCTCCGAGTCTACAGCTGCTCTGGGCTGCCTGGTCAAGGACTACTTTCCTGAGCCTGTGACCGTGTCCTGG
AACTCTGGCGCTCTGACATCTGGCGTGCACACCTTTCCAGCTGTGCTGCAGTCCTCCGGCCTGTACTCTCTGTCCTC
TGTCGTGACCGTGCCTTCCTCTAGCCTGGGCACCAAGACCTACACCTGTAATGTGGACCACAAGCCTTCCAACACCA
AGGTGGACAAGCGCGTGGAATCTAAGTACGGCCCTCCTTGTCCTCCATGTCCTGCTCCAGAAGCTGCTGGCGGCCCA
TCCGTGTTTCTGTTCCCTCCAAAGCCTAAGGACACCCTGATGATCTCTCGGACCCCTGAAGTGACCTGCGTGGTGGT
GGATGTGTCCCAAGAGGATCCCGAGGTGCAGTTCAATTGGTACGTGGACGGCGTGGAAGTGCACAACGCCAAGACCA
AGCCTAGAGAGGAACAGTTCAACTCCACCTACAGAGTGGTGTCCGTGCTGACCGTGCTGCACCAGGATTGGCTGAAC
GGCAAAGAGTACAAGTGCAAGGTGTCCAACAAGGGCCTGCCTTCCAGCATCGAAAAGACCATCTCCAAGGCCAAGGG
CCAGCCTAGGGAACCCCAGGTTTACACCCTGCCTCCAAGCCAAGAGGAAATGACCAAGAACCAGGTGTCCCTGTCCT
GCGCCGTGAAGGGCTTCTACCCTTCCGATATCGCCGTGGAATGGGAGAGCAATGGCCAGCCTGAGAACAACTACAAG
ACAACCCCTCCTGTGCTGGACTCCGACGGCTCCTTCTTCCTGGTGTCCCGCCTGACCGTGGACAAGTCCAGATGGCA
AGAGGGCAACGTGTTCTCCTGCTCCGTGATGCACGAGGCCCTGCACAATCACTACACCCAGAAGTCCCTGTCTCTGT
CCCTGGGATGA
>Sequence ID 299: SI-75XM9 chain B amino acid sequence
QSALTQPASVSGSPGQSITISCTGTSSDVGGYNFVSWYQQHPGKAPKLMIYDVSDRPSGVSDRFSGSKSGNTASLII
SGLQADDEADYYCSSYGSSSTHVIFGGGTKVTVLGGGGSGGGGSGGGGSGGGGSQVQLQESGGGLVKPGGSLSLSCA
ASGFTFSSYWMSWVRQAPGKGLEWVANINRDGSASYYVDSVKGRFTISRDDAKNSLYLQMNSLRAEDTAVYYCARDR
GVGYFDLWGRGTLVTVSSGGGGSGGGGSDPQLTQSPSSLSATVGQRVTINCQSSQSVAKNNNLAWFQQKPGKPPKLL
IYSASTLAAGVPSRFSGSGSGTQFTLTITRVQSEDFATYYCSARDSGNIQSFGGGTRVEIKRTVAAPSVFIFPPSDE
QLKSGTASVVCLLNNFYPREAKVQWKVDNALQSGNSQESVTEQDSKDSTYSLSSTLTLSKADYEKHKVYACEVTHQG
LSSPVTKSFNRGECGGGPPCPPCPAPEAAGGPSVFLFPPKPKDTLMISRTPEVTCVVVDVSQEDPEVQFNWYVDGVE
VHNAKTKPREEQFNSTYRVVSVLTVLHQDWLNGKEYKCKVSNKGLPSSIEKTISKAKGQPREPQVYTLPPSQEEMTK
NQVSLWCLVKGFYPSDIAVEWESNGQPENNYKTTPPVLDSDGSFFLYSRLTVDKSRWQEGNVFSCSVMHEALHNRFT
QKSLSLSLG
>Sequence ID 300: SI-75XM9 chain B nucleotide sequence
CAGTCTGCCCTGACTCAGCCTGCCTCCGTGTCTGGGTCTCCTGGACAGTCGATCACCATCTCCTGCACTGGAACCAG
CAGTGACGTTGGTGGTTATAACTTTGTCTCCTGGTACCAACAACACCCAGGCAAAGCCCCCAAACTCATGATCTATG
ATGTCAGTGATCGGCCCTCAGGGGTGTCTGATCGCTTCTCCGGCTCCAAGTCTGGCAACACGGCCTCCCTGATCATC
TCTGGCCTCCAGGCTGACGACGAGGCTGATTATTACTGCAGCTCATATGGGAGCAGCAGCACTCATGTGATTTTCGG
CGGAGGGACCAAGGTGACCGTCCTAGGCGGTGGCGGTAGTGGGGGAGGCGGTTCTGGCGGCGGAGGGTCCGGCGGTG
GAGGATCACAGGTGCAATTGCAGGAGTCGGGGGGAGGCCTGGTCAAGCCTGGAGGGTCCCTGAGCCTCTCCTGTGCA
GCCTCTGGATTCACCTTTAGTAGTTATTGGATGAGCTGGGTCCGCCAGGCTCCAGGGAAGGGGCTGGAGTGGGTGGC
CAACATAAACCGCGATGGAAGTGCGAGTTACTATGTGGACTCTGTGAAGGGCCGATTCACCATCTCCAGAGACGACG
CCAAGAACTCACTGTATCTGCAAATGAACAGCCTGAGAGCTGAGGACACGGCTGTGTATTACTGTGCGAGAGATCGT
GGGGTGGGCTACTTCGATCTCTGGGGCCGTGGCACCCTGGTCACCGTCTCGAGTGGCGGTGGAGGGTCCGGCGGTGG
TGGATCAGATCCTCAATTGACCCAGTCCCCTAGTAGCCTTTCTGCAACCGTGGGCCAGAGGGTAACAATCAATTGCC
AGTCAAGCCAGTCCGTAGCGAAGAATAATAATTTGGCATGGTTCCAACAAAAACCGGGTAAACCTCCTAAACTCCTT
ATCTACTCAGCTTCAACCCTTGCCGCGGGTGTGCCCAGCCGGTTCTCAGGCTCAGGTTCCGGGACTCAATTTACACT
TACCATCACTCGCGTCCAAAGTGAGGATTTTGCAACCTACTATTGTTCTGCACGGGATTCCGGGAACATACAGTCCT
TTGGGGGTGGAACTCGGGTGGAGATAAAACGTACGGTGGCTGCACCATCTGTCTTCATCTTCCCGCCATCTGATGAG
CAGTTGAAATCTGGAACTGCCTCTGTTGTGTGCCTGCTGAATAACTTCTATCCCAGAGAGGCCAAAGTACAGTGGAA
GGTGGATAACGCCCTCCAATCGGGTAACTCCCAGGAGAGTGTCACAGAGCAGGACAGCAAGGACAGCACCTACAGCC
TCAGCAGCACCCTGACGCTGAGCAAAGCAGACTACGAGAAACACAAAGTCTACGCCTGCGAAGTCACCCATCAGGGC
CTGAGCTCGCCCGTCACAAAGAGCTTCAACAGGGGAGAGTGTGGCGGCGGACCTCCTTGTCCTCCATGTCCTGCTCC
AGAAGCTGCTGGCGGCCCATCCGTGTTTCTGTTCCCTCCAAAGCCTAAGGACACCCTGATGATCTCTCGGACCCCTG
AAGTGACCTGCGTGGTGGTGGATGTGTCCCAAGAGGATCCCGAGGTGCAGTTCAATTGGTACGTGGACGGCGTGGAA
GTGCACAACGCCAAGACCAAGCCTAGAGAGGAACAGTTCAACTCCACCTACAGAGTGGTGTCCGTGCTGACCGTGCT
GCACCAGGATTGGCTGAACGGCAAAGAGTACAAGTGCAAGGTGTCCAACAAGGGCCTGCCTTCCAGCATCGAAAAGA
CCATCTCCAAGGCCAAGGGCCAGCCTAGGGAACCCCAGGTTTACACCCTGCCTCCAAGCCAAGAGGAAATGACCAAG
AACCAGGTGTCCCTGTGGTGCCTCGTGAAGGGCTTCTACCCTTCCGATATCGCCGTGGAATGGGAGAGCAATGGCCA
GCCTGAGAACAACTACAAGACAACCCCTCCTGTGCTGGACTCCGACGGCTCCTTCTTCCTGTATTCCCGCCTGACCG
TGGACAAGTCCAGATGGCAAGAGGGCAACGTGTTCTCCTGCTCCGTGATGCACGAGGCCCTGCACAATCGCTTCACC
CAGAAGTCCCTGTCTCTGTCCCTGGGATGA
>Sequence ID 301: anti-CEA 656E11 CDR-H1 amino acid sequence
GTQYVC
>Sequence ID 302: anti-CEA 656E11 CDR-H2 amino acid sequence
CIYVDVANTYYATSVKG
>Sequence ID 303: anti-CEA 656E11 CDR-H3 amino acid sequence
HDTVCAGCGLDL
>Sequence ID 304: anti-CEA 656E11 CDR-L1 amino acid sequence
QASENIYSNLA
>Sequence ID 305: anti-CEA 656E11 CDR-L2 amino acid sequence
DASTLAS
>Sequence ID 306: anti-CEA 656E11 CDR-L3 amino acid sequence
QSTYYNNIIYGAA
>Sequence ID 307: anti-CD3 283E3 (BSM/FRS) CDR-H1 amino acid sequence
SNAIG
>Sequence ID 308: anti-CD3 283E3 (BSM/FRS) CDR-H2 amino acid sequence
VIFGSGNTYYASWAKG
>Sequence ID 309: anti-CD3 283E3 (BSM/FRS) CDR-H3 amino acid sequence
GGYSSDI
>Sequence ID 310: anti-CD3 283E3 (BSM/FRS) CDR-L1 amino acid sequence
QSSQSVAKNNNLA
>Sequence ID 311: anti-CD3 283E3 (BSM/FRS) CDR-L2 amino acid sequence
SASTLAA
>Sequence ID 312: anti-CD3 283E3 (BSM/FRS) CDR-L3 amino acid sequence
SARDSGNIQS
>Sequence ID 313: human IgG1 amino acid sequence
ASTKGPSVFPLAPSSKSTSGGTAALGCLVKDYFPEPVTVSWNSGALTSGVHTFPAVLQSSGLYSLSSVVTVPSSSLG
TQTYICNVNHKPSNTKVDKRVEPKSCDKTHTCPPCPAPELLGGPSVFLFPPKPKDTLMISRTPEVTCVVVDVSHEDP
EVKFNWYVDGVEVHNAKTKPREEQYNSTYRVVSVLTVLHQDWLNGKEYKCKVSNKALPAPIEKTISKAKGQPREPQV
YTLPPSRDELTKNQVSLTCLVKGFYPSDIAVEWESNGQPENNYKTTPPVLDSDGSFFLYSKLTVDKSRWQQGNVFSC
SVMHEALHNHYTQKSLSLSPG
>Sequence ID 314: human IgG4 amino acid sequence
ASTKGPSVFPLAPCSRSTSESTAALGCLVKDYFPEPVTVSWNSGALTSGVHTFPAVLQSSGLYSLSSVVTVPSSSLG
TKTYTCNVDHKPSNTKVDKRVESKYGPPCPSCPAPEFLGGPSVFLFPPKPKDTLMISRTPEVTCVVVDVSQEDPEVQ
FNWYVDGVEVHNAKTKPREEQFNSTYRVVSVLTVLHQDWLNGKEYKCKVSNKGLPSSIEKTISKAKGQPREPQVYTL
PPSQEEMTKNQVSLTCLVKGFYPSDIAVEWESNGQPENNYKTTPPVLDSDGSFFLYSRLTVDKSRWQEGNVFSCSVM
HEALHNHYTQKSLSLSLG

What is claimed is:

1. A multi-specific antibody-like protein having a N-terminus and a C-terminus, comprising,
a first monomer, comprising, from the N-terminus to the C-terminus, a first binding monomer, a CH1 domain, a first hinge, a first CH2 domain, and a first CH3 domain, wherein the first monomer comprises optionally a first binding domain (D1) linked to the N-terminus, a fourth binding domain (D4) linked to the C-terminus, or both,
a second monomer, comprising, from the N-terminus to the C-terminus, a second binding monomer, a CL domain, a second hinge, a second CH2 domain, and a second CH3 domain, wherein the second monomer comprises optionally a second binding domain (D2) linked to the N-terminus, a fifth binding domain (D5) linked to the C-terminus, or both,
wherein the first binding monomer and a second binding monomer are configured to form a dimer,
wherein the first monomer and the second monomer are covalently paired through at least one disulfide bond between the CH1 domain and the CL domain and at least one disulfide bond between the first hinge and the second hinge, and
wherein the multi-specific antibody-like protein is at least bi-specific.

2. The multi-specific antibody-like protein of claim 1, wherein the first binding monomer comprises a VH domain, a second binding monomer comprises a VL domain, and wherein the VH, CH1, VL, CL domains form a Fab region as a third binding domain (D3).

3. The multi-specific antibody-like protein of claim 1, wherein the first binding monomer and the second binding monomer form a NKG2D receptor as a third binding domain (D3).

4. The multi-specific antibody-like protein of claim 1, wherein the first CH3 domain is configured to form a hole structure, wherein the second CH3 domain is configured to form a knob structure, and wherein the first CH2 and CH3 domains and the second CH2 and CH3 domains are configured to heterodimerize to form a complementary Fc domain.

5. The multi-specific antibody-like protein of claim 1, wherein the D1, D2, D4, and D5 is independently a scFv domain, a VHH domain, a receptor, or a ligand.

6. The multi-specific antibody-like protein of claim 1, wherein the D1, D2, D3, D4, and D5 each independently has a binding specificity against an antigen selected, EGFR, HER2, HER3, EGFRvIII, ROR1, CD3, CD28, CEA, LMP1, LMP2A, Mesothelin, PSMA, EpCAM, glypican-3, gpA33, GD2, TROP2, NKG2D, NKG2D ligand, BCMA, CD19, CD20, CD33, CD123, CD22, CD30, PD-L1, PD1, OX40, 4-1BB, GITR, TIGIT, TIM-3, LAG-3, CTLA4, CD40, CD40L, VISTA, ICOS, BTLA, LIGHT, HVEM, CSF1R, CD73, CD39, CLDN18.2, DLL3, HLA-G, FcRH5, GPRC5D, LIV-1, MUC1, CD138, CD70, CD16, uPAR, Siglec-15, CD47, CD38, NKp46, PD-L2, CD160, LOX-1, SIRPα, CD27 and wherein the Fc domain comprises a human IgG Fc domain.

7. The multi-specific antibody-like protein of claim 1, wherein D1 has a binding specificity to CD3, CD20, CEA, HER2, EGFR, or NKG2D ligand.

8. The multi-specific antibody-like protein of claim 1, wherein D2 has a binding specificity to HER3, EGFR, CD3, or CD19.

9. The multi-specific antibody-like protein of claim 1, wherein D3 has a binding specificity to HER3, EGFR, CD3, or NKG2D ligands.

10. The multi-specific antibody-like protein of claim 1, wherein D4 has a binding specificity to 4-1BB, or EGFR.

11. The multi-specific antibody-like protein of claim 1, wherein D5 has a binding specificity to PD-L1 or HER3.

12. The multi-specific antibody-like protein of claim 1, wherein the antibody is a tri-specific antibody having the binding specificity to EGFR, HER3, and CD3.

13. The multi-specific antibody-like protein of claim 1, wherein the antibody is a tetra-specific antibody having the binding specificity to EGFR, HER3, CD3, and 4-1BB.

14. The multi-specific antibody-like protein of claim 1, wherein the antibody is a tetra-specific antibody having the binding specificity to EGFR, HER3, CD3, and PD-L1.

15. The multi-specific antibody-like protein of claim 1, wherein the antibody is a penta-specific antibody having the binding specificity to EGFR, HER3, CD3, 4-1BB and PD-L1.

16. A complimentary determining region (CDR) having an affinity to CEA, comprising an amino acid sequence having sequence identity to SEQ ID NO. 301, 302, 303, 304, 305, or 306.

17. A protein having an affinity to CEA, comprising the CDR of claim 16.

18. A multi-specific antibody-like protein having a binding affinity to CEA, wherein the antibody-like protein comprises an amino acid sequence having sequence identity to an amino acid sequence selected from SEQ ID NO. 279, 280, 281 or 282.

19. A complimentary determining region (CDR) having a binding affinity to CD3, comprising an amino acid sequence having sequence identity to SEQ ID NO. 307, 308, 309, 310, 311 or 312.

20. A protein having an affinity to CD3, comprising CDR of claim 19.

21. A multi-specific antibody-like protein having a binding affinity to CD3, wherein the antibody-like protein comprises an amino acid sequence having sequence identity to an amino acid sequence selected from SEQ ID NO. 227-230, 231-234, 235-238, 239-242 and 291-294.

22. An isolated nucleic acid sequence encoding the multi-specific antibody-like protein of claim 1.

23. An expression vector comprising the isolated nucleic acid sequences of claim 22.

24. A host cell comprising the isolated nucleic acid sequence of claim 22.

25. An immunoconjugate comprising the multi-specific antibody-like protein of claim 1 and a cytotoxic agent.

26. A pharmaceutical composition, comprising the multi-specific antibody-like protein of claim 1 and a pharmaceutically acceptable carrier.

27. A pharmaceutical composition, comprising the immunoconjugate of claim 25 and a pharmaceutically acceptable carrier.

28. A method for treating or preventing a cancer, an autoimmune disease, or an infectious disease in a subject, said method comprising administering to the subject a pharmaceutical composition comprising a purified multi-specific antibody-like protein of claim 1.

29. A method for producing the multi-specific antibody-like protein of claim 1, comprising
culturing a host cell such that the DNA sequence encoding the multi-specific antibody-like protein of claim 1 is expressed, and
purifying said multi-specific antibody-like protein.

30. (canceled)

The application's sequence listing, which the Patent Office published only in electronic form, follows.

SEQUENCE LISTING (314 sequences)

SEQ ID NO: 1 - protein, 442 aa, Artificial Sequence
  Synthesized
QVQLQESGGRLVQPGEPLSLTCKTSGIDLSSNAIGWVRQAPGKGLEWIGVIFGSGNTYYASWAKGRFTISRSTSTVYLKMNSLRSEDTAIYYCARGGYSSDIWGQGTLVTVSSASTKGPSVFPLAPSSKSTSGGTAALGCLVKDYFPEPVTVSWNSGALTSGVHTFPAVLQSSGLYSLSSVVTVPSSSLGTQTYICNVNHKPSNTKVDKRVEPKSCDKTHTCPPCPAPEAAGGPSVFLFPPKPKDTLMISRTPEVTCVVVDVSHEDPEVKFNWYVDGVEVHNAKTKPREEQYNSTYRVVSVLTVLHQDWLNGKEYKCAVSNKALPAPIEKTISKAKGQPREPQVYTLPPSRDELTKNQVSLSCAVKGFYPSDIAVEWESNGQPENNYKTTPPVLDSDGSFFLVSKLTVDKSRWQQGNVFSCSVMHEALHNHYTQKSLSLSPG

SEQ ID NO: 2 - DNA, 1326 bp, Artificial Sequence
  Synthesized
caagtgcagttgcaagaaagtggtggtagactggttcagcctggtgaacccttgtcactgacgtgtaaaacaagcggcattgatctgtcctctaacgccatcggatgggtccgacaggccccaggaaaaggtctggagtggatcggagttatcttcgggagcggcaatacatactacgcaagctgggcaaaagggcgatttacgatatcacggagcacctctacagtttatttgaaaatgaactccctccggtccgaggataccgcgatatattactgtgccagaggggggtactcctctgatatctgggggcagggtacactggttacagtttcatccgctagcaccaaaggcccctctgtgttccctctggccccctcctccaagagcacctctggaggcactgctgccctgggctgcctggtgaaggactacttcccagagcctgtgactgtgtcctggaactctggagccctgacctctggagtgcacaccttccctgctgtgctgcagagctctggcctctacagcctgtcctctgtggtcactgtgccctcctccagcctgggcacccagacctacatctgcaatgtgaaccacaagccctccaacaccaaggtggacaagagagtggagcccaagtcctgtgacaagacccacacctgccctccctgcccagccccagaggctgctggaggcccctctgtgttcctcttccctcccaagcccaaggacaccctgatgatctccaggaccccagaagtcacctgtgtggtggtggatgtgtcccatgaagacccagaagtgaagttcaactggtatgtggatggagtggaggtgcacaatgccaagaccaagcccagagaagagcagtacaactccacctaccgagtggtgtctgtgctgactgtgctgcaccaggactggctgaatgggaaggagtacaagtgtgctgtgtccaacaaggccctgcctgcccccattgagaagaccatctccaaggccaagggccagcccagagagccccaggtctacaccctgcctccctccagagatgagctgaccaagaaccaggtgtccctgtcctgtgctgtgaaaggcttctaccccagtgacattgctgtggagtgggagagcaatggccagccagagaacaactacaagaccacccctcctgtgctggactctgatggctccttcttcctggtctccaagctgactgtggacaagagccgctggcagcagggcaatgtgttctcctgctctgtcatgcatgaggccctgcacaaccactacacccagaagagcctgagcctgagccctgga

SEQ ID NO: 3 - protein, 704 aa, Artificial Sequence
  Synthesized
QSALTQPASVSGSPGQSITISCTGTSSDVGGYNFVSWYQQHPGKAPKLMIYDVSDRPSGVSDRFSGSKSGNTASLIISGLQADDEADYYCSSYGSSSTHVIFGGGTKVTVLGGGGSGGGGSGGGGSGGGGSQVQLQESGGGLVKPGGSLSLSCAASGFTFSSYWMSWVRQAPGKGLEWVANINRDGSASYYVDSVKGRFTISRDDAKNSLYLQMNSLRAEDTAVYYCARDRGVGYFDLWGRGTLVTVSSGGGGSGGGGSDPQLTQSPSSLSATVGQRVTINCQSSQSVAKNNNLAWFQQKPGKPPKLLIYSASTLAAGVPSRFSGSGSGTQFTLTITRVQSEDFATYYCSARDSGNIQSFGGGTRVEIKRTVAAPSVFIFPPSDEQLKSGTASVVCLLNNFYPREAKVQWKVDNALQSGNSQESVTEQDSKDSTYSLSSTLTLSKADYEKHKVYACEVTHQGLSSPVTKSFNRGECGGDKTHTCPPCPAPEAAGGPSVFLFPPKPKDTLMISRTPEVTCVVVDVSHEDPEVKFNWYVDGVEVHNAKTKPREEQYNSTYRVVSVLTVLHQDWLNGKEYKCAVSNKALPAPIEKTISKAKGQPREPQVYTLPPSRDELTKNQVSLWCLVKGFYPSDIAVEWESNGQPENNYKTTPPVLDSDGSFFLYSKLTVDKSRWQQGNVFSCSVMHEALHNRFTQKSLSLSPG

SEQ ID NO: 4 - DNA, 2112 bp, Artificial Sequence
  Synthesized
cagtctgccctgactcagcctgcctccgtgtctgggtctcctggacagtcgatcaccatctcctgcactggaaccagcagtgacgttggtggttataactttgtctcctggtaccaacaacacccaggcaaagcccccaaactcatgatctatgatgtcagtgatcggccctcaggggtgtctgatcgcttctccggctccaagtctggcaacacggcctccctgatcatctctggcctccaggctgacgacgaggctgattattactgcagctcatatgggagcagcagcactcatgtgattttcggcggagggaccaaggtgaccgtcctaggcggtggcggtagtgggggaggcggttctggcggcggagggtccggcggtggaggatcacaggtgcaattgcaggagtcggggggaggcctggtcaagcctggagggtccctgagcctctcctgtgcagcctctggattcacctttagtagttattggatgagctgggtccgccaggctccagggaaggggctggagtgggtggccaacataaaccgcgatggaagtgcgagttactatgtggactctgtgaagggccgattcaccatctccagagacgacgccaagaactcactgtatctgcaaatgaacagcctgagagctgaggacacggctgtgtattactgtgcgagagatcgtggggtgggctacttcgatctctggggccgtggcaccctggtcaccgtctcgagtggcggtggagggtccggcggtggtggatcagatcctcaattgacccagtcccctagtagcctttctgcaaccgtgggccagagggtaacaatcaattgccagtcaagccagtccgtagcgaagaataataatttggcatggttccaacaaaaaccgggtaaacctcctaaactccttatctactcagcttcaacccttgccgcgggtgtgcccagccggttctcaggctcaggttccgggactcaatttacacttaccatcactcgcgtccaaagtgaggattttgcaacctactattgttctgcacgggattccgggaacatacagtcctttgggggtggaactcgggtggagataaaacgtacggtggctgccccctctgtgttcatcttcccacccagtgatgagcagctgaagagtggcacagcctctgtggtgtgcctgctcaacaacttctaccccagagaagccaaggtgcagtggaaggtggacaatgccctgcagagtggcaacagccaggagagtgtgacagagcaggacagcaaggacagcacctacagcctgtcctccaccctgaccctgtccaaggctgactatgagaagcacaaggtgtatgcctgtgaggtgacccaccagggcctgagcagccctgtgaccaagagcttcaaccgaggagagtgtggaggagacaagacccacacctgccctccctgcccagccccagaagctgctggaggcccctctgtgttcctcttccctcccaagcccaaggacaccctgatgatctccaggaccccagaagtcacctgtgtggtggtggatgtgtcccatgaagacccagaagtgaagttcaactggtatgtggatggagtggaagtgcacaatgccaagaccaagcccagagaagagcagtacaacagcacctaccgagtggtgtctgtgctgactgtgctgcaccaggactggctgaatgggaaggagtacaagtgtgctgtgtccaacaaggccctgcctgcccccattgagaagaccatctccaaggccaagggccagcccagagagccccaggtctacaccctgcctccctccagagatgagctgaccaagaaccaggtgtccctgtggtgcctggtgaaaggcttctaccccagtgacattgctgtggagtgggagagcaatggccagccagagaacaactacaagaccacccctcctgtgctggactctgatggctccttcttcctgtacagcaagctgactgtggacaagagccgctggcagcagggcaatgtgttctcctgctctgtcatgcatgaggccctgcacaaccgcttcacccagaagagcctgagcctgagccctgga

SEQ ID NO: 5 - protein, 442 aa, Artificial Sequence; identical to SEQ ID NO: 1
  Synthesized

SEQ ID NO: 6 - DNA, 1326 bp, Artificial Sequence; identical to SEQ ID NO: 2
  Synthesized

SEQ ID NO: 7 - protein, 704 aa, Artificial Sequence
  Synthesized
QSALTQPASVSGSPGQSITISCTGTSSDVGGYNFVSWYQQHPGKAPKLMIYDVSDRPSGVSDRFSGSKSGNTASLIISGLQADDEADYYCSSYGSSSTHVIFGGGTKVTVLGGGGSGGGGSGGGGSGGGGSQVQLQESGGGLVKPGGSLRLSCAASGFTFSSYWMSWVRQAPGKGLEWVANINRDGSASYYVDSVKGRFTISRDDAKNSLYLQMNSLRAEDTAVYYCARDRGVGYFDLWGRGTLVTVSSGGGGSGGGGSDPQLTQSPSSLSATVGQRVTINCQSSQSVAKNNNLAWFQQKPGKPPKLLIYSASTLAAGVPSRFSGSGSGTQFTLTITRVQSEDFATYYCSARDSGNIQSFGGGTRVEIKRTVAAPSVFIFPPSDEQLKSGTASVVCLLNNFYPREAKVQWKVDNALQSGNSQESVTEQDSKDSTYSLSSTLTLSKADYEKHKVYACEVTHQGLSSPVTKSFNRGECGGDKTHTCPPCPAPEAAGGPSVFLFPPKPKDTLMISRTPEVTCVVVDVSHEDPEVKFNWYVDGVEVHNAKTKPREEQYNSTYRVVSVLTVLHQDWLNGKEYKCAVSNKALPAPIEKTISKAKGQPREPQVYTLPPSRDELTKNQVSLWCLVKGFYPSDIAVEWESNGQPENNYKTTPPVLDSDGSFFLYSKLTVDKSRWQQGNVFSCSVMHEALHNRFTQKSLSLSPG

SEQ ID NO: 8 - DNA, 2112 bp, Artificial Sequence
  Synthesized
cagtctgccctgactcagcctgcctccgtgtctgggtctcctggacagtcgatcaccatctcctgcactggaaccagcagtgacgttggtggttataactttgtctcctggtaccaacaacacccaggcaaagcccccaaactcatgatctatgatgtcagtgatcggccctcaggggtgtctgatcgcttctccggctccaagtctggcaacacggcctccctgatcatctctggcctccaggctgacgacgaggctgattattactgcagctcatatgggagcagcagcactcatgtgattttcggcggagggaccaaggtgaccgtcctaggcggtggcggtagtgggggaggcggttctggcggcggagggtccggcggtggaggatcacaggtgcaattgcaggagtcggggggaggcctggtcaagcctggagggtccctgagactctcctgtgcagcctctggattcacctttagtagttattggatgagctgggtccgccaggctccagggaaggggctggagtgggtggccaacataaaccgcgatggaagtgcgagttactatgtggactctgtgaagggccgattcaccatctccagagacgacgccaagaactcactgtatctgcaaatgaacagcctgagagctgaggacacggctgtgtattactgtgcgagagatcgtggggtgggctacttcgatctctggggccgtggcaccctggtcaccgtctcgagtggcggtggagggtccggcggtggtggatcagatcctcaattgacccagtcccctagtagcctttctgcaaccgtgggccagagggtaacaatcaattgccagtcaagccagtccgtagcgaagaataataatttggcatggttccaacaaaaaccgggtaaacctcctaaactccttatctactcagcttcaacccttgccgcgggtgtgcccagccggttctcaggctcaggttccgggactcaatttacacttaccatcactcgcgtccaaagtgaggattttgcaacctactattgttctgcacgggattccgggaacatacagtcctttgggggtggaactcgggtggagataaaacgtacggtggctgccccctctgtgttcatcttcccacccagtgatgagcagctgaagagtggcacagcctctgtggtgtgcctgctcaacaacttctaccccagagaagccaaggtgcagtggaaggtggacaatgccctgcagagtggcaacagccaggagagtgtgacagagcaggacagcaaggacagcacctacagcctgtcctccaccctgaccctgtccaaggctgactatgagaagcacaaggtgtatgcctgtgaggtgacccaccagggcctgagcagccctgtgaccaagagcttcaaccgaggagagtgtggaggagacaagacccacacctgccctccctgcccagccccagaagctgctggaggcccctctgtgttcctcttccctcccaagcccaaggacaccctgatgatctccaggaccccagaagtcacctgtgtggtggtggatgtgtcccatgaagacccagaagtgaagttcaactggtatgtggatggagtggaagtgcacaatgccaagaccaagcccagagaagagcagtacaacagcacctaccgagtggtgtctgtgctgactgtgctgcaccaggactggctgaatgggaaggagtacaagtgtgctgtgtccaacaaggccctgcctgcccccattgagaagaccatctccaaggccaagggccagcccagagagccccaggtctacaccctgcctccctccagagatgagctgaccaagaaccaggtgtccctgtggtgcctggtgaaaggcttctaccccagtgacattgctgtggagtgggagagcaatggccagccagagaacaactacaagaccacccctcctgtgctggactctgatggctccttcttcctgtacagcaagctgactgtggacaagagccgctggcagcagggcaatgtgttctcctgctctgtcatgcatgaggccctgcacaaccgcttcacccagaagagcctgagcctgagccctgga

SEQ ID NO: 9 - protein, 442 aa, Artificial Sequence; identical to SEQ ID NO: 1
  Synthesized

SEQ ID NO: 10 - DNA, 1326 bp, Artificial Sequence; identical to SEQ ID NO: 2
  Synthesized

SEQ ID NO: 11 - protein, 704 aa, Artificial Sequence
  Synthesized
QSALTQPASVSGSPGQSITISCTGTSSDVGGYNFVSWYQQHPGKAPKLMIYDVSDRPSGVSDRFSGSKSGNTASLIISGLQADDEADYYCSSYGSSSTHVIFGGGTKVTVLGGGGSGGGGSGGGGSGGGGSQVQLQESGGGLVKPGGSLSLSCAASGFTFSSYWMSWVRQAPGKGLEWVANINRDGSASYYVDSVKGRFTISRDDAKNSLYLQMNSLRAEDTAVYYCARDRGVGYFDLWGRGTLVTVSSGGGGSGGGGSDPQLTQSPSSLSATVGQRVTINCQSSQSVAKNNNLAWFQQKPGKPPKLLIYSASTLAAGVPSRFSGSGSGTQFTLTITRVQSEDFATYYCSARDSGNIQSFGGGTRVEIKRTVAAPSVFIFPPSDEQLKSGTASVVCLLNNFYPREAKVQWKVDNALQSGNSQESVTEQDSKDSTYSLSSTLTLSKADYEKHKVYACEVTHQGLSSPVTKSFNRGECGGDKTHTCPPCPAPEAAGGPSVFLFPPKPKDTLMISRTPEVTCVVVDVSHEDPEVKFNWYVDGVEVHNAKTKPREEQYNSTYRVVSVLTVLHQDWLNGKEYKCAVSNKALPAPIEKTISKAKGQPREPQVYTLPPSRDELTKNQVSLWCLVKGFYPSDIAVEWESNGQPENNYKTTPPVLDSDGSFFLYSKLTVDKSRWQQGNVFSCSVMHEALHNHYTQKSLSLSPG

SEQ ID NO: 12 - DNA, 2112 bp, Artificial Sequence
  Synthesized
cagtctgccctgactcagcctgcctccgtgtctgggtctcctggacagtcgatcaccatctcctgcactggaaccagcagtgacgttggtggttataactttgtctcctggtaccaacaacacccaggcaaagcccccaaactcatgatctatgatgtcagtgatcggccctcaggggtgtctgatcgcttctccggctccaagtctggcaacacggcctccctgatcatctctggcctccaggctgacgacgaggctgattattactgcagctcatatgggagcagcagcactcatgtgattttcggcggagggaccaaggtgaccgtcctaggcggtggcggtagtgggggaggcggttctggcggcggagggtccggcggtggaggatcacaggtgcaattgcaggagtcggggggaggcctggtcaagcctggagggtccctgagcctctcctgtgcagcctctggattcacctttagtagttattggatgagctgggtccgccaggctccagggaaggggctggagtgggtggccaacataaaccgcgatggaagtgcgagttactatgtggactctgtgaagggccgattcaccatctccagagacgacgccaagaactcactgtatctgcaaatgaacagcctgagagctgaggacacggctgtgtattactgtgcgagagatcgtggggtgggctacttcgatctctggggccgtggcaccctggtcaccgtctcgagtggcggtggagggtccggcggtggtggatcagatcctcaattgacccagtcccctagtagcctttctgcaaccgtgggccagagggtaacaatcaattgccagtcaagccagtccgtagcgaagaataataatttggcatggttccaacaaaaaccgggtaaacctcctaaactccttatctactcagcttcaacccttgccgcgggtgtgcccagccggttctcaggctcaggttccgggactcaatttacacttaccatcactcgcgtccaaagtgaggattttgcaacctactattgttctgcacgggattccgggaacatacagtcctttgggggtggaactcgggtggagataaaacgtacggtggctgccccctctgtgttcatcttcccacccagtgatgagcagctgaagagtggcacagcctctgtggtgtgcctgctcaacaacttctaccccagagaagccaaggtgcagtggaaggtggacaatgccctgcagagtggcaacagccaggagagtgtgacagagcaggacagcaaggacagcacctacagcctgtcctccaccctgaccctgtccaaggctgactatgagaagcacaaggtgtatgcctgtgaggtgacccaccagggcctgagcagccctgtgaccaagagcttcaaccgaggagagtgtggaggagacaagacccacacctgccctccctgcccagccccagaagctgctggaggcccctctgtgttcctcttccctcccaagcccaaggacaccctgatgatctccaggaccccagaagtcacctgtgtggtggtggatgtgtcccatgaagacccagaagtgaagttcaactggtatgtggatggagtggaagtgcacaatgccaagaccaagcccagagaagagcagtacaacagcacctaccgagtggtgtctgtgctgactgtgctgcaccaggactggctgaatgggaaggagtacaagtgtgctgtgtccaacaaggccctgcctgcccccattgagaagaccatctccaaggccaagggccagcccagagagccccaggtctacaccctgcctccctccagagatgagctgaccaagaaccaggtgtccctgtggtgcctggtgaaaggcttctaccccagtgacattgctgtggagtgggagagcaatggccagccagagaacaactacaagaccacccctcctgtgctggactctgatggctccttcttcctgtacagcaagctgactgtggacaagagccgctggcagcagggcaatgtgttctcctgctctgtcatgcatgaggccctgcacaaccactacacccagaagagcctgagcctgagccctgga

SEQ ID NO: 13 - protein, 442 aa, Artificial Sequence; identical to SEQ ID NO: 1
  Synthesized

SEQ ID NO: 14 - DNA, 1326 bp, Artificial Sequence; identical to SEQ ID NO: 2
  Synthesized

SEQ ID NO: 15 - protein, 704 aa, Artificial Sequence
  Synthesized
QSALTQPASVSGSPGQSITISCTGTSSDVGGYNFVSWYQQHPGKAPKLMIYDVSDRPSGVSDRFSGSKSGNTASLIISGLQADDEADYYCSSYGSSSTHVIFGGGTKVTVLGGGGSGGGGSGGGGSGGGGSQVQLQESGGGLVKPGGSLRLSCAASGFTFSSYWMSWVRQAPGKGLEWVANINRDGSASYYVDSVKGRFTISRDDAKNSLYLQMNSLRAEDTAVYYCARDRGVGYFDLWGRGTLVTVSSGGGGSGGGGSDPQLTQSPSSLSATVGQRVTINCQSSQSVAKNNNLAWFQQKPGKPPKLLIYSASTLAAGVPSRFSGSGSGTQFTLTITRVQSEDFATYYCSARDSGNIQSFGGGTRVEIKRTVAAPSVFIFPPSDEQLKSGTASVVCLLNNFYPREAKVQWKVDNALQSGNSQESVTEQDSKDSTYSLSSTLTLSKADYEKHKVYACEVTHQGLSSPVTKSFNRGECGGDKTHTCPPCPAPEAAGGPSVFLFPPKPKDTLMISRTPEVTCVVVDVSHEDPEVKFNWYVDGVEVHNAKTKPREEQYNSTYRVVSVLTVLHQDWLNGKEYKCAVSNKALPAPIEKTISKAKGQPREPQVYTLPPSRDELTKNQVSLWCLVKGFYPSDIAVEWESNGQPENNYKTTPPVLDSDGSFFLYSKLTVDKSRWQQGNVFSCSVMHEALHNHYTQKSLSLSPG

SEQ ID NO: 16 - DNA, 2112 bp, Artificial Sequence
  Synthesized
cagtctgccctgactcagcctgcctccgtgtctgggtctcctggacagtcgatcaccatctcctgcactggaaccagcagtgacgttggtggttataactttgtctcctggtaccaacaacacccaggcaaagcccccaaactcatgatctatgatgtcagtgatcggccctcaggggtgtctgatcgcttctccggctccaagtctggcaacacggcctccctgatcatctctggcctccaggctgacgacgaggctgattattactgcagctcatatgggagcagcagcactcatgtgattttcggcggagggaccaaggtgaccgtcctaggcggtggcggtagtgggggaggcggttctggcggcggagggtccggcggtggaggatcacaggtgcaattgcaggagtcggggggaggcctggtcaagcctggagggtccctgagactctcctgtgcagcctctggattcacctttagtagttattggatgagctgggtccgccaggctccagggaaggggctggagtgggtggccaacataaaccgcgatggaagtgcgagttactatgtggactctgtgaagggccgattcaccatctccagagacgacgccaagaactcactgtatctgcaaatgaacagcctgagagctgaggacacggctgtgtattactgtgcgagagatcgtggggtgggctacttcgatctctggggccgtggcaccctggtcaccgtctcgagtggcggtggagggtccggcggtggtggatcagatcctcaattgacccagtcccctagtagcctttctgcaaccgtgggccagagggtaacaatcaattgccagtcaagccagtccgtagcgaagaataataatttggcatggttccaacaaaaaccgggtaaacctcctaaactccttatctactcagcttcaacccttgccgcgggtgtgcccagccggttctcaggctcaggttccgggactcaatttacacttaccatcactcgcgtccaaagtgaggattttgcaacctactattgttctgcacgggattccgggaacatacagtcctttgggggtggaactcgggtggagataaaacgtacggtggctgccccctctgtgttcatcttcccacccagtgatgagcagctgaagagtggcacagcctctgtggtgtgcctgctcaacaacttctaccccagagaagccaaggtgcagtggaaggtggacaatgccctgcagagtggcaacagccaggagagtgtgacagagcaggacagcaaggacagcacctacagcctgtcctccaccctgaccctgtccaaggctgactatgagaagcacaaggtgtatgcctgtgaggtgacccaccagggcctgagcagccctgtgaccaagagcttcaaccgaggagagtgtggaggagacaagacccacacctgccctccctgcccagccccagaagctgctggaggcccctctgtgttcctcttccctcccaagcccaaggacaccctgatgatctccaggaccccagaagtcacctgtgtggtggtggatgtgtcccatgaagacccagaagtgaagttcaactggtatgtggatggagtggaagtgcacaatgccaagaccaagcccagagaagagcagtacaacagcacctaccgagtggtgtctgtgctgactgtgctgcaccaggactggctgaatgggaaggagtacaagtgtgctgtgtccaacaaggccctgcctgcccccattgagaagaccatctccaaggccaagggccagcccagagagccccaggtctacaccctgcctccctccagagatgagctgaccaagaaccaggtgtccctgtggtgcctggtgaaaggcttctaccccagtgacattgctgtggagtgggagagcaatggccagccagagaacaactacaagaccacccctcctgtgctggactctgatggctccttcttcctgtacagcaagctgactgtggacaagagccgctggcagcagggcaatgtgttctcctgctctgtcatgcatgaggccctgcacaaccactacacccagaagagcctgagcctgagccctgga

SEQ ID NO: 17 - protein, 967 aa, Artificial Sequence
  Synthesized
DVVMTQSPSTLSASVGDRVTINCQASESISSWLAWYQQKPGKAPKLLIYEASKLASGVPSRFSGSGSGTEFTLTISSLQPDDFATYYCQGYFYFISRTYVNSFGGGTKVEIKGGGGSGGGGSGGGGSGGGGSEVQLVESGGGLVQPGGSLRLSCAASGFTISTNAMSWVRQAPGKGLEWIGVITGRDITYYASWAKGRFTISRDNSKNTLYLQMNSLRAEDTAVYYCARDGGSSAITSNNIWGQGTLVTVSSGGGGSGGGGSQVQLQQSGPGLVKPSETLSITCTVSGFSLTNYGVHWIRQAPGKGLEWLGVIWSGGNTDYNTPFTSRFTITKDNSKNQVYFKLRSVRADDTAIYYCARALTYYDYEFAYWGQGTLVTVSSASTKGPSVFPLAPSSKSTSGGTAALGCLVKDYFPEPVTVSWNSGALTSGVHTFPAVLQSSGLYSLSSVVTVPSSSLGTQTYICNVNHKPSNTKVDKRVEPKSCDKTHTCPPCPAPEAAGGPSVFLFPPKPKDTLMISRTPEVTCVVVDVSHEDPEVKFNWYVDGVEVHNAKTKPREEQYNSTYRVVSVLTVLHQDWLNGKEYKCAVSNKALPAPIEKTISKAKGQPREPQVYTLPPSRDELTKNQVSLSCAVKGFYPSDIAVEWESNGQPENNYKTTPPVLDSDGSFFLVSKLTVDKSRWQQGNVFSCSVMHEALHNHYTQKSLSLSPGGGGGSGGGGSDVVMTQSPSSVSASVGDRVTITCQASQNIRTYLSWYQQKPGKAPKLLIYAAANLASGVPSRFSGSGSGTDFTLTISDLEPGDAATYYCQSTYLGTDYVGGAFGGGTKLTVLGGGGSGGGGSGGGGSGGGGSEVQLVESGGGLVQPGGSLRLSCTASGFTISSYHMQWVRQAPGKGLEYIGTISSGGNVYYASSARGRFTISRPSSKNTVDLQMNSLRAEDTAVYYCARDSGYSDPMWGQGTLVTVSS

SEQ ID NO: 18 - DNA, 2901 bp, Artificial Sequence
  Synthesized
gacgtcgtgatgacccagtctccttccaccctgtctgcatctgtaggagacagagtcaccatcaattgccaagccagtgagagcattagcagttggttagcctggtatcagcagaaaccagggaaagcccctaagctcctgatctatgaagcatccaaactggcatctggggtcccatcaaggttcagcggcagtggatctgggacagaatttactctcaccatcagcagcctgcagcctgatgattttgcaacttattactgccaaggctatttttattttattagtcgtacttatgtaaattctttcggcggagggaccaaggtggagatcaaaggcggtggcggtagtgggggaggcggttctggcggcggagggtccggcggtggaggatcagaggtgcagctggtggagtctgggggaggcttggtccagcctggggggtccctgagactctcctgtgcagcctctggattcaccatcagtaccaatgcaatgagctgggtccgccaggctccagggaaggggctggagtggatcggagtcattactggtcgtgatatcacatactacgcgagctgggcgaaaggcagattcaccatctccagagacaattccaagaacacgctgtatcttcaaatgaacagcctgagagccgaggacacggctgtgtattactgtgcgagagacggtggttcttctgctattactagtaacaacatttggggccagggaaccctggtcaccgtctcgagtggcggtggagggtccggcggtggtggatcacaagtacagttgcagcaatccggtcccggtctcgtcaaaccgagtgagacgcttagtataacgtgtactgtttcaggctttagccttacgaactatggagttcactggattcggcaggcacccggcaaaggtttggaatggctgggtgttatttggtcaggtggaaatacagactataacaccccctttacaagtcggttcacaattacgaaagataattccaaaaatcaagtttatttcaagttgagatccgtccgcgcggacgacactgcgatctactattgtgcgagggcactgacctactacgattacgaatttgcgtattgggggcaagggactcttgtaacagtctccagtgctagcaccaagggcccatcggtcttccccctggcaccctcctccaagagcacctctgggggcacagcggccctgggctgcctggtcaaggactacttccccgaaccggtgacggtgtcgtggaactcaggcgccctgaccagcggcgtgcacaccttcccggctgtcctacagtcctcaggactctactccctcagcagcgtggtgaccgtgccctccagcagcttgggcacccagacctacatctgcaacgtgaatcacaagcccagcaacaccaaggtggacaagagagttgagcccaaatcttgtgacaaaactcacacatgcccaccgtgcccagcacctgaagccgcggggggaccgtcagtcttcctcttccccccaaaacccaaggacaccctcatgatctcccggacccctgaggtcacatgcgtggtggtggacgtgagccacgaagaccctgaggtcaagttcaactggtacgtggacggcgtggaggtgcataatgccaagacaaagccgcgggaggagcagtacaacagcacgtaccgtgtggtcagcgtcctcaccgtcctgcaccaggactggctgaatggcaaggagtacaagtgcgcggtctccaacaaagccctcccagcccccatcgagaaaaccatctccaaagccaaagggcagccccgagaaccacaggtgtataccctgcccccatcccgggatgagctgaccaagaaccaggtcagcctgtcctgcgccgtcaaaggcttctatcccagcgacatcgccgtggagtgggagagcaatgggcagccggagaacaactacaagaccacgcctcccgtgctggactccgacggctccttcttcctcgtgagcaagctcaccgtggacaagagcaggtggcagcaggggaacgtcttctcatgctccgtgatgcatgaggctctgcacaaccactacacgcagaagagcctctccctgtctccgggtggcggcggcggttcaggtggtgggggatccgacgttgtgatgacgcagtctcctagttcagtatcagcgtctgttggggatcgagtcacgattacatgccaggcgagccaaaatattaggacgtatctgtcttggtatcaacaaaagcctggtaaggctccaaaactcctcatttacgccgctgccaacttggctagtggagtaccttcacgctttagtgggtcaggttctggaacagattttacgttgacgatctccgatttggaaccaggggacgctgccacgtattattgccagtccacctacctcgggactgactacgttggtggggcgtttggcggaggaacaaaactcactgtacttggtggtggtggttcaggcggggggggttccggcggaggcggttctgggggtggaggttccgaggttcagttggttgaaagtggggggggactcgttcagcctggaggctctttgcgactttcttgtaccgcttctgggttcactataagttcatatcatatgcaatgggtaagacaggcgcctggtaagggacttgaatacataggaacaataagctctggtggtaacgtctattacgcctcatccgcgcgggggaggtttacaatttccaggccttctagcaaaaacacggtagatctgcaaatgaactctcttcgcgctgaagatacagcagtctactactgcgccagggattcagggtattctgaccccatgtgggggcagggcacattggttaccgtgtcctct

SEQ ID NO: 19 - protein, 963 aa, Artificial Sequence
  Synthesized
QSALTQPASVSGSPGQSITISCTGTSSDVGGYNFVSWYQQHPGKAPKLMIYDVSDRPSGVSDRFSGSKSGNTASLIISGLQADDEADYYCSSYGSSSTHVIFGGGTKVTVLGGGGSGGGGSGGGGSGGGGSQVQLQESGGGLVKPGGSLSLSCAASGFTFSSYWMSWVRQAPGKGLEWVANINRDGSASYYVDSVKGRFTISRDDAKNSLYLQMNSLRAEDTAVYYCARDRGVGYFDLWGRGTLVTVSSGGGGSGGGGSEIVLTQSPSTLSVSPGERATFSCRASQSIGTNIHWYQQKPGKPPRLLIKYASESISGIPDRFSGSGSGTEFTLTISSVQSEDFAVYYCQQNNNWPTTFGPGTKLTVLRTVAAPSVFIFPPSDEQLKSGTASVVCLLNNFYPREAKVQWKVDNALQSGNSQESVTEQDSKDSTYSLSSTLTLSKADYEKHKVYACEVTHQGLSSPVTKSFNRGECGGDKTHTCPPCPAPEAAGGPSVFLFPPKPKDTLMISRTPEVTCVVVDVSHEDPEVKFNWYVDGVEVHNAKTKPREEQYNSTYRVVSVLTVLHQDWLNGKEYKCAVSNKALPAPIEKTISKAKGQPREPQVYTLPPSRDELTKNQVSLWCLVKGFYPSDIAVEWESNGQPENNYKTTPPVLDSDGSFFLYSKLTVDKSRWQQGNVFSCSVMHEALHNRFTQKSLSLSPGGGGGSGGGGSDIQMTQSPSTLSASVGDRVTITCQASQSISSHLNWYQQKPGKAPKLLIYKASTLASGVPSRFSGSGSGTEFTLTISSLQPDDFATYYCQQGYSWGNVDNVFGGGTKVTVLGGGGSGGGGSGGGGSGGGGSEVQLLESGGGLVQPGGSLSLSCAASGFSFSSGYDMCWVRQAPGKGLEWIACIAAGSAGITYDANWAKGRFTISRDNSKNTLYLQMNSLRAEDTAVYYCARSAFSFDYAMDLWGQGTLVTVSS

SEQ ID NO: 20 - DNA, 2892 bp, Artificial Sequence
  Synthesized
cagtctgccctgactcagcctgcctccgtgtctgggtctcctggacagtcgatcaccatctcctgcactggaaccagcagtgacgttggtggttataactttgtctcctggtaccaacaacacccaggcaaagcccccaaactcatgatctatgatgtcagtgatcggccctcaggggtgtctgatcgcttctccggctccaagtctggcaacacggcctccctgatcatctctggcctccaggctgacgacgaggctgattattactgcagctcatatgggagcagcagcactcatgtgattttcggcggagggaccaaggtgaccgtcctaggcggtggcggtagtgggggaggcggttctggcggcggagggtccggcggtggaggatcacaggtgcaattgcaggagtcggggggaggcctggtcaagcctggagggtccctgagcctctcctgtgcagcctctggattcacctttagtagttattggatgagctgggtccgccaggctccagggaaggggctggagtgggtggccaacataaaccgcgatggaagtgcgagttactatgtggactctgtgaagggccgattcaccatctccagagacgacgccaagaactcactgtatctgcaaatgaacagcctgagagctgaggacacggctgtgtattactgtgcgagagatcgtggggtgggctacttcgatctctggggccgtggcaccctggtcaccgtctcgagtggcggtggagggtccggcggtggtggatcagaaatcgtccttacacaatctcctagcacactgagtgtgagccccggcgaacgcgcgactttctcttgcagggcaagtcaatccatagggactaatatacattggtatcaacaaaagccaggtaaaccacccaggcttttgattaagtatgcaagtgagtctatttccggtatccctgaccgcttctctggatcaggcagtggcacagagttcacactcaccatatctagtgtgcaatcagaggacttcgccgtgtattactgccaacagaataataactggccgactaccttcggacccggtacaaagctgaccgttttacgtacggtggctgcaccatctgtcttcatcttcccgccatctgatgagcagttgaaatctggaactgcctctgttgtgtgcctgctgaataacttctatcccagagaggccaaagtacagtggaaggtggataacgccctccaatcgggtaactcccaggagagtgtcacagagcaggacagcaaggacagcacctacagcctcagcagcaccctgacgctgagcaaagcagactacgagaaacacaaagtctacgcctgcgaagtcacccatcagggcctgagctcgcccgtcacaaagagcttcaacaggggagagtgtggaggcgacaaaactcacacatgcccaccgtgcccagcacctgaagccgcggggggaccgtcagtcttcctcttccccccaaaacccaaggacaccctcatgatctcccggacccctgaggtcacatgcgtggtggtggacgtgagccacgaagaccctgaggtcaagttcaactggtacgtggacggcgtggaggtgcataatgccaagacaaagccgcgggaggagcagtacaacagcacgtaccgtgtggtcagcgtcctcaccgtcctgcaccaggactggctgaatggcaaggagtacaagtgcgcggtctccaacaaagccctcccagcccccatcgagaaaaccatctccaaagccaaagggcagccccgagaaccacaggtgtacaccctgcccccaagccgggatgagctgaccaagaaccaggtcagcctgtggtgcctggtcaaaggcttctatcccagcgacatcgccgtggagtgggagagcaatgggcagccggagaacaactacaagaccacgcctcccgtgctggactccgacggctccttcttcctctatagcaagctcaccgtggacaagagcaggtggcagcaggggaacgtcttctcatgctccgtgatgcatgaggctctgcacaacagattcacgcagaagagcctctccctgtctccgggtggcggtggagggtccggcggtggtggatccgacattcagatgacacagtcaccgtctacgctctcagcctcagtaggcgatagggtgactatcacctgccaagcctcccaatctataagttcacacctcaactggtatcaacagaaacccggtaaagcaccgaagctgctcatctacaaggcatcaactcttgcctcaggtgtgcctagtcgcttctccgggagcggctccggtactgagtttactttgacgatatcttccctccaacccgacgacttcgccacatactattgtcagcagggttatagttggggaaatgttgacaatgtgtttggagggggaacgaaagtgactgtgttgggagggggaggaagtggcggcggcggaagcggaggtggtggctccggcgggggtggaagcgaagtgcaattgctcgaaagtggtggcggacttgtgcaacctggtggaagcctctcactctcttgcgcggcgagtggttttagcttcagtagcggctacgatatgtgctgggtaagacaggctcctggtaaaggccttgagtggattgcgtgtatcgccgccgggtctgctggtataacatacgatgcaaactgggcgaaagggcgcttcacaatctccagggacaactcaaaaaatacattgtacctccagatgaatagcctgagagccgaagacaccgcagtctactattgcgcaaggtcagcatttagcttcgattatgcaatggatctttggggccaggggacgctcgtcaccgtctcatcttga

SEQ ID NO: 21 - protein, 1277 aa, Artificial Sequence
  Synthesized
EIVLTQSPSTLSVSPGERATFSCRASQSIGTNIHWYQQKPGKPPRLLIKYASESISGIPDRFSGSGSGTEFTLTISSVQSEDFAVYYCQQNNNWPTTFGPGTKLTVLGGGGSGGGGSGGGGSGGGGSQVQLQQSGPGLVKPSETLSITCTVSGFSLTNYGVHWIRQAPGKGLEWLGVIWSGGNTDYNTPFTSRFTITKDNSKNQVYFKLRSVRADDTAIYYCARALTYYDYEFAYWGQGTLVTVSSGGGGSGGGGSEVQLVESGGGLVQPGGSLRLSCAASGFTISTNAMSWVRQAPGKGLEWIGVITGRDITYYASWAKGRFTISRDNSKNTLYLQMNSLRAEDTAVYYCARDGGSSAITSNNIWGQGTLVTVSSASTKGPSVFPLAPSSKSTSGGTAALGCLVKDYFPEPVTVSWNSGALTSGVHTFPAVLQSSGLYSLSSVVTVPSSSLGTQTYICNVNHKPSNTKVDKRVEPKSCDKTHTCPPCPAPEAAGGPSVFLFPPKPKDTLMISRTPEVTCVVVDVSHEDPEVKFNWYVDGVEVHNAKTKPREEQYNSTYRVVSVLTVLHQDWLNGKEYKCAVSNKALPAPIEKTISKAKGQPREPQVYTLPPSRDELTKNQVSLSCAVKGFYPSDIAVEWESNGQPENNYKTTPPVLDSDGSFFLVSKLTVDKSRWQQGNVFSCSVMHEALHNHYTQKSLSLSPGGGGGSGGGGSREGPELSPDDPAGLLDLRQGMFAQLVAQNVLLIDGPLSWYSDPGLAGVSLTGGLSYKEDTKELVVAKAGVYYVFFQLELRRVVAGEGSGSVSLALHLQPLRSAAGAAALALTVDLPPASSEARNSAFGFQGRLLHLSAGQRLGVHLHTEARARHAWQLTQGATVLGLFRVTPEIPAGLGSTGSGSKPGSGEGSTKGREGPELSPDDPAGLLDLRQGMFAQLVAQNVLLIDGPLSWYSDPGLAGVSLTGGLSYKEDTKELVVAKAGVYYVFFQLELRRVVAGEGSGSVSLALHLQPLRSAAGAAALALTVDLPPASSEARNSAFGFQGRLLHLSAGQRLGVHLHTEARARHAWQLTQGATVLGLFRVTPEIPAGLGGGGSGGGGSREGPELSPDDPAGLLDLRQGMFAQLVAQNVLLIDGPLSWYSDPGLAGVSLTGGLSYKEDTKELVVAKAGVYYVFFQLELRRVVAGEGSGSVSLALHLQPLRSAAGAAALALTVDLPPASSEARNSAFGFQGRLLHLSAGQRLGVHLHTEARARHAWQLTQGATVLGLFRVTPEIPAGL

SEQ ID NO: 22 - DNA, 3834 bp, Artificial Sequence
  Synthesized
gaaatcgtccttacacaatctcctagcacactgagtgtgagccccggcgaacgcgcgactttctcttgcagggcaagtcaatccatagggactaatatacattggtatcaacaaaagccaggtaaaccacccaggcttttgattaagtatgcaagtgagtctatttccggtatccctgaccgcttctctggatcaggcagtggcacagagttcacactcaccatatctagtgtgcaatcagaggacttcgccgtgtattactgccaacagaataataactggccgactaccttcggacccggtacaaagctgaccgttttaggcggtggcggtagtgggggaggcggttctggcggcggagggtccggcggtggaggatcacaagtacagttgcagcaatccggtcccggtctcgtcaaaccgagtgagacgcttagtataacgtgtactgtttcaggctttagccttacgaactatggagttcactggattcggcaggcacccggcaaaggtttggaatggctgggtgttatttggtcaggtggaaatacagactataacaccccctttacaagtcggttcacaattacgaaagataattccaaaaatcaagtttatttcaagttgagatccgtccgcgcggacgacactgcgatctactattgtgcgagggcactgacctactacgattacgaatttgcgtattgggggcaagggactcttgtaacagtctcgagcggcggtggagggtccggcggtggtggatcagaggtgcagctggtggagtctgggggaggcttggtccagcctggggggtccctgagactctcctgtgcagcctctggattcaccatcagtaccaatgcaatgagctgggtccgccaggctccagggaaggggctggagtggatcggagtcattactggtcgtgatatcacatactacgcgagctgggcgaaaggcagattcaccatctccagagacaattccaagaacacgctgtatcttcaaatgaacagcctgagagccgaggacacggctgtgtattactgtgcgagagacggtggttcttctgctattactagtaacaacatttggggccagggaaccctggtcaccgtgtcctcagctagcaccaagggcccatcggtcttccccctggcaccctcctccaagagcacctctgggggcacagcggccctgggctgcctggtcaaggactacttccccgaaccggtgacggtgtcgtggaactcaggcgccctgaccagcggcgtgcacaccttcccggctgtcctacagtcctcaggactctactccctcagcagcgtggtgaccgtgccctccagcagcttgggcacccagacctacatctgcaacgtgaatcacaagcccagcaacaccaaggtggacaagagagttgagcccaaatcttgtgacaaaactcacacatgcccaccgtgcccagcacctgaagccgcggggggaccgtcagtcttcctcttccccccaaaacccaaggacaccctcatgatctcccggacccctgaggtcacatgcgtggtggtggacgtgagccacgaagaccctgaggtcaagttcaactggtacgtggacggcgtggaggtgcataatgccaagacaaagccgcgggaggagcagtacaacagcacgtaccgtgtggtcagcgtcctcaccgtcctgcaccaggactggctgaatggcaaggagtacaagtgcgcggtctccaacaaagccctcccagcccccatcgagaaaaccatctccaaagccaaagggcagccccgagaaccacaggtgtataccctgcccccatcccgggatgagctgaccaagaaccaggtcagcctgtcctgcgccgtcaaaggcttctatcccagcgacatcgccgtggagtgggagagcaatgggcagccggagaacaactacaagaccacgcctcccgtgctggactccgacggctccttcttcctcgtgagcaagctcaccgtggacaagagcaggtggcagcaggggaacgtcttctcatgctccgtgatgcatgaggctctgcacaaccactacacgcagaagagcctctccctgtctccgggtggcggcggcggttcaggtggtgggggatcccgagagggccccgagctgtctcctgatgacccagcaggcctcttggacttgcggcagggtatgttcgctcaacttgtggctcagaatgttctgctcattgatggaccactctcttggtatagtgaccccggtctggccggggtgagtctgaccggcgggctctcttataaagaggatactaaggaactggtcgtagcaaaagcgggcgtttattacgttttttttcagctggagctcaggcgcgtggtggccggcgagggcagtggctctgtgtccctggccctgcacttacagcccttgagaagcgctgcaggtgctgccgcactggctttaactgttgacctccctccggcctcttctgaagctagaaacagcgctttcggcttccaagggcgcctgctgcacctgagcgcaggccagcgcttaggtgtgcaccttcatacagaggccagggcccgacacgcttggcagctcacacagggtgccacggttctcggacttttccgcgttactcccgagatccccgctggcctcggaagtactggttctgggtctaaacccggttccggcgaaggtagtactaaaggacgagaagggccagagttaagtccagatgaccctgctgggcttttggacctgcggcagggcatgttcgctcaactggtggctcagaacgtgctgctgatcgatggccccctgagttggtacagcgatcccgggctggcaggcgtgtcacttacagggggcctctcttacaaggaagacaccaaggagttagtggtcgctaaggctggcgtgtattacgtgttcttccaactggagctgagaagggttgtggcaggagagggtagcggcagcgtgtctttagcccttcacttgcagcccctgaggtctgctgcaggtgcagccgctctcgcgctcaccgtggatctccccccagcctcatctgaagctaggaacagtgcatttggctttcagggacgcttgctgcacctctccgctggacagaggctgggcgtgcaccttcacacagaggcccgtgccaggcatgcatggcagctcactcagggggcaacagtgctgggtctcttccgcgtgactcctgaaataccagctggacttggcggtggaggcagcggcggaggaggatctcgtgaggggccagaactgtcccccgatgacccagccggactgctcgatctcagacagggcatgttcgctcagcttgtagcccaaaatgtcctcctgattgacggccctttgagctggtatagtgatcccggcttggccggggtatctctgaccggaggcctctcctacaaggaagacaccaaagagctggtggtggcaaaagcgggggtgtattatgtgttctttcagctcgagctgcggagagttgtggccggggaagggtctgggagcgtatctcttgcacttcacctgcagcccctgcgcagcgccgctggagccgccgcccttgctcttactgtggatctgcctcctgcttcctcagaagcacgcaacagcgccttcggctttcaaggacgtctcctgcacttgtccgcaggacagaggttgggcgtccatttacacactgaggcacgggcacggcacgcttggcagcttacccagggagccaccgtgctgggactctttagagtgacacccgagatccccgctggcttgtga

SEQ ID NO: 23 - protein, 968 aa, Artificial Sequence
  Synthesized
QSALTQPASVSGSPGQSITISCTGTSSDVGGYNFVSWYQQHPGKAPKLMIYDVSDRPSGVSDRFSGSKSGNTASLIISGLQADDEADYYCSSYGSSSTHVIFGGGTKVTVLGGGGSGGGGSGGGGSGGGGSQVQLQESGGGLVKPGGSLSLSCAASGFTFSSYWMSWVRQAPGKGLEWVANINRDGSASYYVDSVKGRFTISRDDAKNSLYLQMNSLRAEDTAVYYCARDRGVGYFDLWGRGTLVTVSSGGGGSGGGGSDVVMTQSPSTLSASVGDRVTINCQASESISSWLAWYQQKPGKAPKLLIYEASKLASGVPSRFSGSGSGTEFTLTISSLQPDDFATYYCQGYFYFISRTYVNSFGGGTKVEIKRTVAAPSVFIFPPSDEQLKSGTASVVCLLNNFYPREAKVQWKVDNALQSGNSQESVTEQDSKDSTYSLSSTLTLSKADYEKHKVYACEVTHQGLSSPVTKSFNRGECGGDKTHTCPPCPAPEAAGGPSVFLFPPKPKDTLMISRTPEVTCVVVDVSHEDPEVKFNWYVDGVEVHNAKTKPREEQYNSTYRVVSVLTVLHQDWLNGKEYKCAVSNKALPAPIEKTISKAKGQPREPQVYTLPPSRDELTKNQVSLWCLVKGFYPSDIAVEWESNGQPENNYKTTPPVLDSDGSFFLYSKLTVDKSRWQQGNVFSCSVMHEALHNRFTQKSLSLSPGGGGGSGGGGSDIQMTQSPSTLSASVGDRVTITCQASQSISSHLNWYQQKPGKAPKLLIYKASTLASGVPSRFSGSGSGTEFTLTISSLQPDDFATYYCQQGYSWGNVDNVFGGGTKVTVLGGGGSGGGGSGGGGSGGGGSEVQLLESGGGLVQPGGSLSLSCAASGFSFSSGYDMCWVRQAPGKGLEWIACIAAGSAGITYDANWAKGRFTISRDNSKNTLYLQMNSLRAEDTAVYYCARSAFSFDYAMDLWGQGTLVTVSS

SEQ ID NO: 24 - DNA, 2907 bp, Artificial Sequence
  Synthesized
cagtctgccctgactcagcctgcctccgtgtctgggtctcctggacagtcgatcaccatctcctgcactggaaccagcagtgacgttggtggttataactttgtctcctggtaccaacaacacccaggcaaagcccccaaactcatgatctatgatgtcagtgatcggccctcaggggtgtctgatcgcttctccggctccaagtctggcaacacggcctccctgatcatctctggcctccaggctgacgacgaggctgattattactgcagctcatatgggagcagcagcactcatgtgattttcggcggagggaccaaggtgaccgtcctaggcggtggcggtagtgggggaggcggttctggcggcggagggtccggcggtggaggatcacaggtgcaattgcaggagtcggggggaggcctggtcaagcctggagggtccctgagcctctcctgtgcagcctctggattcacctttagtagttattggatgagctgggtccgccaggctccagggaaggggctggagtgggtggccaacataaaccgcgatggaagtgcgagttactatgtggactctgtgaagggccgattcaccatctccagagacgacgccaagaactcactgtatctgcaaatgaacagcctgagagctgaggacacggctgtgtattactgtgcgagagatcgtggggtgggctacttcgatctctggggccgtggcaccctggtcaccgtctcgagcggcggtggagggtccggcggtggtggatcagacgtcgtgatgacccagtctccttccaccctgtctgcatctgtaggagacagagtcaccatcaattgccaagccagtgagagcattagcagttggttagcctggtatcagcagaaaccagggaaagcccctaagctcctgatctatgaagcatccaaactggcatctggggtcccatcaaggttcagcggcagtggatctgggacagaattcactctcaccatcagcagcctgcagcctgatgattttgcaacttattactgccaaggctatttttattttattagtcgtacttatgtaaattctttcggcggagggaccaaggtggagatcaaacgtacggtggctgcaccatctgtcttcatcttcccgccatctgatgagcagttgaaatctggaactgcctctgttgtgtgcctgctgaataacttctatcccagagaggccaaagtacagtggaaggtggataacgccctccaatcgggtaactcccaggagagtgtcacagagcaggacagcaaggacagcacctacagcctcagcagcaccctgacgctgagcaaagcagactacgagaaacacaaagtctacgcctgcgaagtcacccatcagggcctgagctcgcccgtcacaaagagcttcaacaggggagagtgtggaggcgacaaaactcacacatgcccaccgtgcccagcacctgaagccgcggggggaccgtcagtcttcctcttccccccaaaacccaaggacaccctcatgatctcccggacccctgaggtcacatgcgtggtggtggacgtgagccacgaagaccctgaggtcaagttcaactggtacgtggacggcgtggaggtgcataatgccaagacaaagccgcgggaggagcagtacaacagcacgtaccgtgtggtcagcgtcctcaccgtcctgcaccaggactggctgaatggcaaggagtacaagtgcgcggtctccaacaaagccctcccagcccccatcgagaaaaccatctccaaagccaaagggcagccccgagaaccacaggtgtacaccctgcccccaagccgggatgagctgaccaagaaccaggtcagcctgtggtgcctggtcaaaggcttctatcccagcgacatcgccgtggagtgggagagcaatgggcagccggagaacaactacaagaccacgcctcccgtgctggactccgacggctccttcttcctctatagcaagctcaccgtggacaagagcaggtggcagcaggggaacgtcttctcatgctccgtgatgcatgaggctctgcacaacagattcacgcagaagagcctctccctgtctccgggtggcggtggagggtccggcggtggtggatccgacattcagatgacacagtcaccgtctacgctctcagcctcagtaggcgatagggtgactatcacctgccaagcctcccaatctataagttcacacctcaactggtatcaacagaaacccggtaaagcaccgaagctgctcatctacaaggcatcaactcttgcctcaggtgtgcctagtcgcttctccgggagcggctccggtactgagtttactttgacgatatcttccctccaacccgacgacttcgccacatactattgtcagcagggttatagttggggaaatgttgacaatgtgtttggagggggaacgaaagtgactgtgttgggagggggaggaagtggcggcggcggaagcggaggtggtggctccggcgggggtggaagcgaagtgcaattgctcgaaagtggtggcggacttgtgcaacctggtggaagcctctcactctcttgcgcggcgagtggttttagcttcagtagcggctacgatatgtgctgggtaagacaggctcctggtaaaggccttgagtggattgcgtgtatcgccgccgggtctgctggtataacatacgatgcaaactgggcgaaagggcgcttcacaatctccagggacaactcaaaaaatacattgtacctccagatgaatagcctgagagccgaagacaccgcagtctactattgcgcaaggtcagcatttagcttcgattatgcaatggatctttggggccaggggacgctcgtcaccgtctcatcttga

SEQ ID NO: 25 - protein, 962 aa, Artificial Sequence
  Synthesized
EIVLTQSPSTLSVSPGERATFSCRASQSIGTNIHWYQQKPGKPPRLLIKYASESISGIPDRFSGSGSGTEFTLTISSVQSEDFAVYYCQQNNNWPTTFGPGTKLTVLGGGGSGGGGSGGGGSGGGGSQVQLQQSGPGLVKPSETLSITCTVSGFSLTNYGVHWIRQAPGKGLEWLGVIWSGGNTDYNTPFTSRFTITKDNSKNQVYFKLRSVRADDTAIYYCARALTYYDYEFAYWGQGTLVTVSSGGGGSGGGGSEVQLVESGGGLVQPGGSLRLSCAASGFTISTNAMSWVRQAPGKGLEWIGVITGRDITYYASWAKGRFTISRDNSKNTLYLQMNSLRAEDTAVYYCARDGGSSAITSNNIWGQGTLVTVSSASTKGPSVFPLAPSSKSTSGGTAALGCLVKDYFPEPVTVSWNSGALTSGVHTFPAVLQSSGLYSLSSVVTVPSSSLGTQTYICNVNHKPSNTKVDKRVEPKSCDKTHTCPPCPAPEAAGGPSVFLFPPKPKDTLMISRTPEVTCVVVDVSHEDPEVKFNWYVDGVEVHNAKTKPREEQYNSTYRVVSVLTVLHQDWLNGKEYKCAVSNKALPAPIEKTISKAKGQPREPQVYTLPPSRDELTKNQVSLSCAVKGFYPSDIAVEWESNGQPENNYKTTPPVLDSDGSFFLVSKLTVDKSRWQQGNVFSCSVMHEALHNHYTQKSLSLSPGGGGGSGGGGSDVVMTQSPSSVSASVGDRVTITCQASQNIRTYLSWYQQKPGKAPKLLIYAAANLASGVPSRFSGSGSGTDFTLTISDLEPGDAATYYCQSTYLGTDYVGGAFGGGTKLTVLGGGGSGGGGSGGGGSGGGGSEVQLVESGGGLVQPGGSLRLSCTASGFTISSYHMQWVRQAPGKGLEYIGTISSGGNVYYASSARGRFTISRPSSKNTVDLQMNSLRAEDTAVYYCARDSGYSDPMWGQGTLVTVSS

SEQ ID NO: 26 - DNA, 2886 bp, Artificial Sequence
  Synthesized
gaaatcgtccttacacaatctcctagcacactgagtgtgagccccggcgaacgcgcgactttctcttgcagggcaagtcaatccatagggactaatatacattggtatcaacaaaagccaggtaaaccacccaggcttttgattaagtatgcaagtgagtctatttccggtatccctgaccgcttctctggatcaggcagtggcacagagttcacactcaccatatctagtgtgcaatcagaggacttcgccgtgtattactgccaacagaataataactggccgactaccttcggacccggtacaaagctgaccgttttaggcggtggcggtagtgggggaggcggttctggcggcggagggtccggcggtggaggatcacaagtacagttgcagcaatccggtcccggtctcgtcaaaccgagtgagacgcttagtataacgtgtactgtttcaggctttagccttacgaactatggagttcactggattcggcaggcacccggcaaaggtttggaatggctgggtgttatttggtcaggtggaaatacagactataacaccccctttacaagtcggttcacaattacgaaagataattccaaaaatcaagtttatttcaagttgagatccgtccgcgcggacgacactgcgatctactattgtgcgagggcactgacctactacgattacgaatttgcgtattgggggcaagggactcttgtaacagtctcgagcggcggtggagggtccggcggtggtggatcagaggtgcagctggtggagtctgggggaggcttggtccagcctggggggtccctgagactctcctgtgcagcctctggattcaccatcagtaccaatgcaatgagctgggtccgccaggctccagggaaggggctggagtggatcggagtcattactggtcgtgatatcacatactacgcgagctgggcgaaaggcagattcaccatctccagagacaattccaagaacacgctgtatcttcaaatgaacagcctgagagccgaggacacggctgtgtattactgtgcgagagacggtggttcttctgctattactagtaacaacatttggggccagggaaccctggtcaccgtgtcctcagctagcaccaagggcccatcggtcttccccctggcaccctcctccaagagcacctctgggggcacagcggccctgggctgcctggtcaaggactacttccccgaaccggtgacggtgtcgtggaactcaggcgccctgaccagcggcgtgcacaccttcccggctgtcctacagtcctcaggactctactccctcagcagcgtggtgaccgtgccctccagcagcttgggcacccagacctacatctgcaacgtgaatcacaagcccagcaacaccaaggtggacaagagagttgagcccaaatcttgtgacaaaactcacacatgcccaccgtgcccagcacctgaagccgcggggggaccgtcagtcttcctcttccccccaaaacccaaggacaccctcatgatctcccggacccctgaggtcacatgcgtggtggtggacgtgagccacgaagaccctgaggtcaagttcaactggtacgtggacggcgtggaggtgcataatgccaagacaaagccgcgggaggagcagtacaacagcacgtaccgtgtggtcagcgtcctcaccgtcctgcaccaggactggctgaatggcaaggagtacaagtgcgcggtctccaacaaagccctcccagcccccatcgagaaaaccatctccaaagccaaagggcagccccgagaaccacaggtgtataccctgcccccatcccgggatgagctgaccaagaaccaggtcagcctgtcctgcgccgtcaaaggcttctatcccagcgacatcgccgtggagtgggagagcaatgggcagccggagaacaactacaagaccacgcctcccgtgctggactccgacggctccttcttcctcgtgagcaagctcaccgtggacaagagcaggtggcagcaggggaacgtcttctcatgctccgtgatgcatgaggctctgcacaaccactacacgcagaagagcctctccctgtctccgggtggcggcggcggttcaggtggtgggggatccgacgttgtgatgacgcagtctcctagttcagtatcagcgtctgttggggatcgagtcacgattacatgccaggcgagccaaaatattaggacgtatctgtcttggtatcaacaaaagcctggtaaggctccaaaactcctcatttacgccgctgccaacttggctagtggagtaccttcacgctttagtgggtcaggttctggaacagattttacgttgacgatctccgatttggaaccaggggacgctgccacgtattattgccagtccacctacctcgggactgactacgttggtggggcgtttggcggaggaacaaaactcactgtacttggtggtggtggttcaggcggggggggttccggcggaggcggttctgggggtggaggttccgaggttcagttggttgaaagtggggggggactcgttcagcctggaggctctttgcgactttcttgtaccgcttctgggttcactataagttcatatcatatgcaatgggtaagacaggcgcctggtaagggacttgaatacataggaacaataagctctggtggtaacgtctattacgcctcatccgcgcgggggaggtttacaatttccaggccttctagcaaaaacacggtagatctgcaaatgaactctcttcgcgctgaagatacagcagtctactactgcgccagggattcagggtattctgaccccatgtgggggcagggcacattggttaccgtgtcctct

SEQ ID NO: 27 - protein, 968 aa, Artificial Sequence; identical to SEQ ID NO: 23
  Synthesized

SEQ ID NO: 28 - DNA, 2907 bp, Artificial Sequence; identical to SEQ ID NO: 24
  Synthesized

SEQ ID NO: 29 - protein, 960 aa, Artificial Sequence
  Synthesized
EIVLTQSPSTLSVSPGERATFSCRASQSIGTNIHWYQQKPGKPPRLLIKYASESISGIPDRFSGSGSGTEFTLTISSVQSEDFAVYYCQQNNNWPTTFGPGTKLTVLGGGGSGGGGSGGGGSGGGGSQVQLQQSGPGLVKPSETLSITCTVSGFSLTNYGVHWIRQAPGKGLEWLGVIWSGGNTDYNTPFTSRFTITKDNSKNQVYFKLRSVRADDTAIYYCARALTYYDYEFAYWGQGTLVTVSSGGGGSGGGGSQVQLQESGGGLVKPGGSLRLSCAASGFTFSSYWMSWVRQAPGKGLEWVANINRDGSASYYVDSVKGRFTISRDDAKNSLYLQMNSLRAEDTAVYYCARDRGVGYFDLWGRGTLVTVSSASTKGPSVFPLAPSSKSTSGGTAALGCLVKDYFPEPVTVSWNSGALTSGVHTFPAVLQSSGLYSLSSVVTVPSSSLGTQTYICNVNHKPSNTKVDKRVEPKSCDKTHTCPPCPAPEAAGGPSVFLFPPKPKDTLMISRTPEVTCVVVDVSHEDPEVKFNWYVDGVEVHNAKTKPREEQYNSTYRVVSVLTVLHQDWLNGKEYKCAVSNKALPAPIEKTISKAKGQPREPQVYTLPPSRDELTKNQVSLSCAVKGFYPSDIAVEWESNGQPENNYKTTPPVLDSDGSFFLVSKLTVDKSRWQQGNVFSCSVMHEALHNHYTQKSLSLSPGGGGGSGGGGSDVVMTQSPSSVSASVGDRVTITCQASQNIRTYLSWYQQKPGKAPKLLIYAAANLASGVPSRFSGSGSGTDFTLTISDLEPGDAATYYCQSTYLGTDYVGGAFGGGTKLTVLGGGGSGGGGSGGGGSGGGGSEVQLVESGGGLVQPGGSLRLSCTASGFTISSYHMQWVRQAPGKGLEYIGTISSGGNVYYASSARGRFTISRPSSKNTVDLQMNSLRAEDTAVYYCARDSGYSDPMWGQGTLVTVSS

SEQ ID NO: 30 - DNA, 2883 bp, Artificial Sequence
  Synthesized
gaaatcgtccttacacaatctcctagcacactgagtgtgagccccggcgaacgcgcgactttctcttgcagggcaagtcaatccatagggactaatatacattggtatcaacaaaagccaggtaaaccacccaggcttttgattaagtatgcaagtgagtctatttccggtatccctgaccgcttctctggatcaggcagtggcacagagttcacactcaccatatctagtgtgcaatcagaggacttcgccgtgtattactgccaacagaataataactggccgactaccttcggacccggtacaaagctgaccgttttaggcggtggcggtagtgggggaggcggttctggcggcggagggtccggcggtggaggatcacaagtacagttgcagcaatccggtcccggtctcgtcaaaccgagtgagacgcttagtataacgtgtactgtttcaggctttagccttacgaactatggagttcactggattcggcaggcacccggcaaaggtttggaatggctgggtgttatttggtcaggtggaaatacagactataacaccccctttacaagtcggttcacaattacgaaagataattccaaaaatcaagtttatttcaagttgagatccgtccgcgcggacgacactgcgatctactattgtgcgagggcactgacctactacgattacgaatttgcgtattgggggcaagggactcttgtaacagtctcgagcggcggtggagggtccggcggtggtggatcacaggtgcagctgcaggagagtggaggaggcctggtgaagcctggaggcagcctgcggctgtcctgtgctgcctctggcttcaccttctcctcctactggatgagctgggtgcgccaggccccaggcaagggcctggagtgggtggccaacatcaacagagatggctctgcctcctactatgtggactctgtgaaaggccgcttcaccatctccagagatgatgccaagaacagcctgtacctgcagatgaacagcctgagagctgaggacacagctgtgtactactgtgccagagaccgaggtgtgggctactttgacctgtggggcagaggcaccctggtgactgtgtcctctgctagcaccaagggcccatcggtcttccccctggcaccctcctccaagagcacctctgggggcacagcggccctgggctgcctggtcaaggactacttccccgaaccggtgacggtgtcgtggaactcaggcgccctgaccagcggcgtgcacaccttcccggctgtcctacagtcctcaggactctactccctcagcagcgtggtgaccgtgccctccagcagcttgggcacccagacctacatctgcaacgtgaatcacaagcccagcaacaccaaggtggacaagagagttgagcccaaatcttgtgacaaaactcacacatgcccaccgtgcccagcacctgaagccgcggggggaccgtcagtcttcctcttccccccaaaacccaaggacaccctcatgatctcccggacccctgaggtcacatgcgtggtggtggacgtgagccacgaagaccctgaggtcaagttcaactggtacgtggacggcgtggaggtgcataatgccaagacaaagccgcgggaggagcagtacaacagcacgtaccgtgtggtcagcgtcctcaccgtcctgcaccaggactggctgaatggcaaggagtacaagtgcgcggtctccaacaaagccctcccagcccccatcgagaaaaccatctccaaagccaaagggcagccccgagaaccacaggtgtataccctgcccccatcccgggatgagctgaccaagaaccaggtcagcctgtcctgcgccgtcaaaggcttctatcccagcgacatcgccgtggagtgggagagcaatgggcagccggagaacaactacaagaccacgcctcccgtgctggactccgacggctccttcttcctcgtgagcaagctcaccgtggacaagagcaggtggcagcaggggaacgtcttctcatgctccgtgatgcatgaggctctgcacaaccactacacgcagaagagcctctccctgtctccgggtggcggcggcggttcaggtggtgggggatccgacgttgtgatgacgcagtctcctagttcagtatcagcgtctgttggggatcgagtcacgattacatgccaggcgagccaaaatattaggacgtatctgtcttggtatcaacaaaagcctggtaaggctccaaaactcctcatttacgccgctgccaacttggctagtggagtaccttcacgctttagtgggtcaggttctggaacagattttacgttgacgatctccgatttggaaccaggggacgctgccacgtattattgccagtccacctacctcgggactgactacgttggtggggcgtttggcggaggaacaaaactcactgtacttggtggtggtggttcaggcggggggggttccggcggaggcggttctgggggtggaggttccgaggttcagttggttgaaagtggggggggactcgttcagcctggaggctctttgcgactttcttgtaccgcttctgggttcactataagttcatatcatatgcaatgggtaagacaggcgcctggtaagggacttgaatacataggaacaataagctctggtggtaacgtctattacgcctcatccgcgcgggggaggtttacaatttccaggccttctagcaaaaacacggtagatctgcaaatgaactctcttcgcgctgaagatacagcagtctactactgcgccagggattcagggtattctgaccccatgtgggggcagggcacattggttaccgtgtcctcttga

SEQ ID NO: 31 - protein, 969 aa, Artificial Sequence
  Synthesized
DVVMTQSPSTLSASVGDRVTINCQASESISSWLAWYQQKPGKAPKLLIYEASKLASGVPSRFSGSGSGTEFTLTISSLQPDDFATYYCQGYFYFISRTYVNSFGGGTKVEIKGGGGSGGGGSGGGGSGGGGSEVQLVESGGGLVQPGGSLRLSCAASGFTISTNAMSWVRQAPGKGLEWIGVITGRDITYYASWAKGRFTISRDNSKNTLYLQMNSLRAEDTAVYYCARDGGSSAITSNNIWGQGTLVTVSSGGGGSGGGGSQSALTQPASVSGSPGQSITISCTGTSSDVGGYNFVSWYQQHPGKAPKLMIYDVSDRPSGVSDRFSGSKSGNTASLIISGLQADDEADYYCSSYGSSSTHVIFGGGTKVTVLRTPKANPTVTLFPPSSEELQANKATLVCLISDFYPGAVTVAWKADGSPVKAGVETTKPSKQSNNKYAASSYLSLTPEQWKSHRSYSCQVTHEGSTVEKTVAPTECSGGDKTHTCPPCPAPEAAGGPSVFLFPPKPKDTLMISRTPEVTCVVVDVSHEDPEVKFNWYVDGVEVHNAKTKPREEQYNSTYRVVSVLTVLHQDWLNGKEYKCAVSNKALPAPIEKTISKAKGQPREPQVYTLPPSRDELTKNQVSLWCLVKGFYPSDIAVEWESNGQPENNYKTTPPVLDSDGSFFLYSKLTVDKSRWQQGNVFSCSVMHEALHNRFTQKSLSLSPGGGGGSGGGGSDIQMTQSPSTLSASVGDRVTITCQASQSISSHLNWYQQKPGKAPKLLIYKASTLASGVPSRFSGSGSGTEFTLTISSLQPDDFATYYCQQGYSWGNVDNVFGGGTKVTVLGGGGSGGGGSGGGGSGGGGSEVQLLESGGGLVQPGGSLSLSCAASGFSFSSGYDMCWVRQAPGKGLEWIACIAAGSAGITYDANWAKGRFTISRDNSKNTLYLQMNSLRAEDTAVYYCARSAFSFDYAMDLWGQGTLVTVSS

SEQ ID NO: 32 - DNA, 2907 bp, Artificial Sequence
  Synthesized
gacgtcgtgatgacccagtctccttccaccctgtctgcatctgtaggagacagagtcaccatcaattgccaagccagtgagagcattagcagttggttagcctggtatcagcagaaaccagggaaagcccctaagctcctgatctatgaagcatccaaactggcatctggggtcccatcaaggttcagcggcagtggatctgggacagaattcactctcaccatcagcagcctgcagcctgatgattttgcaacttattactgccaaggctatttttattttattagtcgtacttatgtaaattctttcggcggagggaccaaggtggagatcaaaggcggtggcggtagtgggggaggcggttctggcggcggagggtccggcggtggaggatcagaggtgcagctggtggagtctgggggaggcttggtccagcctggggggtccctgagactctcctgtgcagcctctggattcaccatcagtaccaatgcaatgagctgggtccgccaggctccagggaaggggctggagtggatcggagtcattactggtcgtgatatcacatactacgcgagctgggcgaaaggcagattcaccatctccagagacaattccaagaacacgctgtatcttcaaatgaacagcctgagagccgaggacacggctgtgtattactgtgcgagagacggtggttcttctgctattactagtaacaacatttggggccagggaaccctggtcaccgtgtcctcaggcggtggagggtccggcggtggtggatcacagagtgccctgacccagccagcctctgtctctggcagcccaggccagtccatcaccatctcctgcacaggcacctccagtgatgtgggaggctacaactttgtgtcctggtaccagcagcacccaggcaaggcccccaagctcatgatctatgatgtgtctgacagaccctctggagtctctgacagattctctggctccaagagtggcaacacagcctccctcatcatctctggcctgcaggctgatgatgaagctgactactactgctcctcctatggctcctcctccacccatgtcatctttggaggaggcaccaaggtcactgtgctgcgtacgcccaaggccaaccccaccgtgaccctgttccccccaagcagcgaggaactgcaggccaacaaggccaccctcgtgtgcctgatcagcgacttctaccctggcgccgtgaccgtggcctggaaggccgatggatctcccgtgaaggccggcgtggaaaccaccaagcccagcaagcagagcaacaacaaatacgccgccagctcctacctgagcctgacccccgagcagtggaagtcccaccggtcctacagctgccaggtcacacacgaaggcagcaccgtggaaaagacagtggcccccaccgagtgcagcggaggcgacaaaactcacacatgcccaccgtgcccagcacctgaagccgcggggggaccgtcagtcttcctcttccccccaaaacccaaggacaccctcatgatctcccggacccctgaggtcacatgcgtggtggtggacgtgagccacgaagaccctgaggtcaagttcaactggtacgtggacggcgtggaggtgcataatgccaagacaaagccgcgggaggagcagtacaacagcacgtaccgtgtggtcagcgtcctcaccgtcctgcaccaggactggctgaatggcaaggagtacaagtgcgcggtctccaacaaagccctcccagcccccatcgagaaaaccatctccaaagccaaagggcagccccgagaaccacaggtgtacaccctgcccccaagccgggatgagctgaccaagaaccaggtcagcctgtggtgcctggtcaaaggcttctatcccagcgacatcgccgtggagtgggagagcaatgggcagccggagaacaactacaagaccacgcctcccgtgctggactccgacggctccttcttcctctatagcaagctcaccgtggacaagagcaggtggcagcaggggaacgtcttctcatgctccgtgatgcatgaggctctgcacaacagattcacgcagaagagcctctccctgtctccgggtggcggtggagggtccggcggtggtggatccgacattcagatgacacagtcaccgtctacgctctcagcctcagtaggcgatagggtgactatcacctgccaagcctcccaatctataagttcacacctcaactggtatcaacagaaacccggtaaagcaccgaagctgctcatctacaaggcatcaactcttgcctcaggtgtgcctagtcgcttctccgggagcggctccggtactgagtttactttgacgatatcttccctccaacccgacgacttcgccacatactattgtcagcagggttatagttggggaaatgttgacaatgtgtttggagggggaacgaaagtgactgtgttgggagggggaggaagtggcggcggcggaagcggaggtggtggctccggcgggggtggaagcgaagtgcaattgctcgaaagtggtggcggacttgtgcaacctggtggaagcctctcactctcttgcgcggcgagtggttttagcttcagtagcggctacgatatgtgctgggtaagacaggctcctggtaaaggccttgagtggattgcgtgtatcgccgccgggtctgctggtataacatacgatgcaaactgggcgaaagggcgcttcacaatctccagggacaactcaaaaaatacattgtacctccagatgaatagcctgagagccgaagacaccgcagtctactattgcgcaaggtcagcatttagcttcgattatgcaatggatctttggggccaggggacgctcgtcaccgtctcatct

SEQ ID NO: 33 - protein, 962 aa, Artificial Sequence; identical to SEQ ID NO: 25
  Synthesized

SEQ ID NO: 34 - DNA, 2889 bp, Artificial Sequence
  Synthesized
gaaatcgtccttacacaatctcctagcacactgagtgtgagccccggcgaacgcgcgactttctcttgcagggcaagtcaatccatagggactaatatacattggtatcaacaaaagccaggtaaaccacccaggcttttgattaagtatgcaagtgagtctatttccggtatccctgaccgcttctctggatcaggcagtggcacagagttcacactcaccatatctagtgtgcaatcagaggacttcgccgtgtattactgccaacagaataataactggccgactaccttcggacccggtacaaagctgaccgttttaggcggtggcggtagtgggggaggcggttctggcggcggagggtccggcggtggaggatcacaagtacagttgcagcaatccggtcccggtctcgtcaaaccgagtgagacgcttagtataacgtgtactgtttcaggctttagccttacgaactatggagttcactggattcggcaggcacccggcaaaggtttggaatggctgggtgttatttggtcaggtggaaatacagactataacaccccctttacaagtcggttcacaattacgaaagataattccaaaaatcaagtttatttcaagttgagatccgtccgcgcggacgacactgcgatctactattgtgcgagggcactgacctactacgattacgaatttgcgtattgggggcaagggactcttgtaacagtctcgagcggcggtggagggtccggcggtggtggatcagaggtgcagctggtggagtctgggggaggcttggtccagcctggggggtccctgagactctcctgtgcagcctctggattcaccatcagtaccaatgcaatgagctgggtccgccaggctccagggaaggggctggagtggatcggagtcattactggtcgtgatatcacatactacgcgagctgggcgaaaggcagattcaccatctccagagacaattccaagaacacgctgtatcttcaaatgaacagcctgagagccgaggacacggctgtgtattactgtgcgagagacggtggttcttctgctattactagtaacaacatttggggccagggaaccctggtcaccgtgtcctcagctagcaccaagggcccatcggtcttccccctggcaccctcctccaagagcacctctgggggcacagcggccctgggctgcctggtcaaggactacttccccgaaccggtgacggtgtcgtggaactcaggcgccctgaccagcggcgtgcacaccttcccggctgtcctacagtcctcaggactctactccctcagcagcgtggtgaccgtgccctccagcagcttgggcacccagacctacatctgcaacgtgaatcacaagcccagcaacaccaaggtggacaagagagttgagcccaaatcttgtgacaaaactcacacatgcccaccgtgcccagcacctgaagccgcggggggaccgtcagtcttcctcttccccccaaaacccaaggacaccctcatgatctcccggacccctgaggtcacatgcgtggtggtggacgtgagccacgaagaccctgaggtcaagttcaactggtacgtggacggcgtggaggtgcataatgccaagacaaagccgcgggaggagcagtacaacagcacgtaccgtgtggtcagcgtcctcaccgtcctgcaccaggactggctgaatggcaaggagtacaagtgcgcggtctccaacaaagccctcccagcccccatcgagaaaaccatctccaaagccaaagggcagccccgagaaccacaggtgtataccctgcccccatcccgggatgagctgaccaagaaccaggtcagcctgtcctgcgccgtcaaaggcttctatcccagcgacatcgccgtggagtgggagagcaatgggcagccggagaacaactacaagaccacgcctcccgtgctggactccgacggctccttcttcctcgtgagcaagctcaccgtggacaagagcaggtggcagcaggggaacgtcttctcatgctccgtgatgcatgaggctctgcacaaccactacacgcagaagagcctctccctgtctccgggtggcggcggcggttcaggtggtgggggatccgacgttgtgatgacgcagtctcctagttcagtatcagcgtctgttggggatcgagtcacgattacatgccaggcgagccaaaatattaggacgtatctgtcttggtatcaacaaaagcctggtaaggctccaaaactcctcatttacgccgctgccaacttggctagtggagtaccttcacgctttagtgggtcaggttctggaacagattttacgttgacgatctccgatttggaaccaggggacgctgccacgtattattgccagtccacctacctcgggactgactacgttggtggggcgtttggcggaggaacaaaactcactgtacttggtggtggtggttcaggcggggggggttccggcggaggcggttctgggggtggaggttccgaggttcagttggttgaaagtggggggggactcgttcagcctggaggctctttgcgactttcttgtaccgcttctgggttcactataagttcatatcatatgcaatgggtaagacaggcgcctggtaagggacttgaatacataggaacaataagctctggtggtaacgtctattacgcctcatccgcgcgggggaggtttacaatttccaggccttctagcaaaaacacggtagatctgcaaatgaactctcttcgcgctgaagatacagcagtctactactgcgccagggattcagggtattctgaccccatgtgggggcagggcacattggttaccgtgtcctcttga

SEQ ID NO: 35 - protein, 706 aa, Artificial Sequence
  Synthesized
QSALTQPASVSGSPGQSITISCTGTSSDVGGYNFVSWYQQHPGKAPKLMIYDVSDRPSGVSDRFSGSKSGNTASLIISGLQADDEADYYCSSYGSSSTHVIFGGGTKVTVLGGGGSGGGGSGGGGSGGGGSQVQLQESGGGLVKPGGSLSLSCAASGFTFSSYWMSWVRQAPGKGLEWVANINRDGSASYYVDSVKGRFTISRDDAKNSLYLQMNSLRAEDTAVYYCARDRGVGYFDLWGRGTLVTVSSGGGGSGGGGSDVVMTQSPSTLSASVGDRVTINCQASESISSWLAWYQQKPGKAPKLLIYEASKLASGVPSRFSGSGSGTEFTLTISSLQPDDFATYYCQGYFYFISRTYVNSFGGGTKVEIKRTVAAPSVFIFPPSDEQLKSGTASVVCLLNNFYPREAKVQWKVDNALQSGNSQESVTEQDSKDSTYSLSSTLTLSKADYEKHKVYACEVTHQGLSSPVTKSFNRGECGGDKTHTCPPCPAPEAAGGPSVFLFPPKPKDTLMISRTPEVTCVVVDVSHEDPEVKFNWYVDGVEVHNAKTKPREEQYNSTYRVVSVLTVLHQDWLNGKEYKCAVSNKALPAPIEKTISKAKGQPREPQVYTLPPSRDELTKNQVSLWCLVKGFYPSDIAVEWESNGQPENNYKTTPPVLDSDGSFFLYSKLTVDKSRWQQGNVFSCSVMHEALHNRFTQKSLSLSPG

SEQ ID NO: 36 - DNA, 2121 bp, Artificial Sequence
  Synthesized
cagtctgccctgactcagcctgcctccgtgtctgggtctcctggacagtcgatcaccatctcctgcactggaaccagcagtgacgttggtggttataactttgtctcctggtaccaacaacacccaggcaaagcccccaaactcatgatctatgatgtcagtgatcggccctcaggggtgtctgatcgcttctccggctccaagtctggcaacacggcctccctgatcatctctggcctccaggctgacgacgaggctgattattactgcagctcatatgggagcagcagcactcatgtgattttcggcggagggaccaaggtgaccgtcctaggcggtggcggtagtgggggaggcggttctggcggcggagggtccggcggtggaggatcacaggtgcaattgcaggagtcggggggaggcctggtcaagcctggagggtccctgagcctctcctgtgcagcctctggattcacctttagtagttattggatgagctgggtccgccaggctccagggaaggggctggagtgggtggccaacataaaccgcgatggaagtgcgagttactatgtggactctgtgaagggccgattcaccatctccagagacgacgccaagaactcactgtatctgcaaatgaacagcctgagagctgaggacacggctgtgtattactgtgcgagagatcgtggggtgggctacttcgatctctggggccgtggcaccctggtcaccgtctcgagcggcggtggagggtccggcggtggtggatcagacgtcgtgatgacccagtctccttccaccctgtctgcatctgtaggagacagagtcaccatcaattgccaagccagtgagagcattagcagttggttagcctggtatcagcagaaaccagggaaagcccctaagctcctgatctatgaagcatccaaactggcatctggggtcccatcaaggttcagcggcagtggatctgggacagaattcactctcaccatcagcagcctgcagcctgatgattttgcaacttattactgccaaggctatttttattttattagtcgtacttatgtaaattctttcggcggagggaccaaggtggagatcaaacgtacggtggctgccccctctgtgttcatcttcccacccagtgatgagcagctgaagagtggcacagcctctgtggtgtgcctgctcaacaacttctaccccagagaagccaaggtgcagtggaaggtggacaatgccctgcagagtggcaacagccaggagagtgtgacagagcaggacagcaaggacagcacctacagcctgtcctccaccctgaccctgtccaaggctgactatgagaagcacaaggtgtatgcctgtgaggtgacccaccagggcctgagcagccctgtgaccaagagcttcaaccgaggagagtgtggaggagacaagacccacacctgccctccctgcccagccccagaagctgctggaggcccctctgtgttcctcttccctcccaagcccaaggacaccctgatgatctccaggaccccagaagtcacctgtgtggtggtggatgtgtcccatgaagacccagaagtgaagttcaactggtatgtggatggagtggaagtgcacaatgccaagaccaagcccagagaagagcagtacaacagcacctaccgagtggtgtctgtgctgactgtgctgcaccaggactggctgaatgggaaggagtacaagtgtgctgtgtccaacaaggccctgcctgcccccattgagaagaccatctccaaggccaagggccagcccagagagccccaggtctacaccctgcctccctccagagatgagctgaccaagaaccaggtgtccctgtggtgcctggtgaaaggcttctaccccagtgacattgctgtggagtgggagagcaatggccagccagagaacaactacaagaccacccctcctgtgctggactctgatggctccttcttcctgtacagcaagctgactgtggacaagagccgctggcagcagggcaatgtgttctcctgctctgtcatgcatgaggccctgcacaaccgcttcacccagaagagcctgagcctgagccctggatga

SEQ ID NO: 37 - protein, 705 aa, Artificial Sequence
  Synthesized
EIVLTQSPSTLSVSPGERATFSCRASQSIGTNIHWYQQKPGKPPRLLIKYASESISGIPDRFSGSGSGTEFTLTISSVQSEDFAVYYCQQNNNWPTTFGPGTKLTVLGGGGSGGGGSGGGGSGGGGSQVQLQQSGPGLVKPSETLSITCTVSGFSLTNYGVHWIRQAPGKGLEWLGVIWSGGNTDYNTPFTSRFTITKDNSKNQVYFKLRSVRADDTAIYYCARALTYYDYEFAYWGQGTLVTVSSGGGGSGGGGSEVQLVESGGGLVQPGGSLRLSCAASGFTISTNAMSWVRQAPGKGLEWIGVITGRDITYYASWAKGRFTISRDNSKNTLYLQMNSLRAEDTAVYYCARDGGSSAITSNNIWGQGTLVTVSSASTKGPSVFPLAPSSKSTSGGTAALGCLVKDYFPEPVTVSWNSGALTSGVHTFPAVLQSSGLYSLSSVVTVPSSSLGTQTYICNVNHKPSNTKVDKRVEPKSCDKTHTCPPCPAPEAAGGPSVFLFPPKPKDTLMISRTPEVTCVVVDVSHEDPEVKFNWYVDGVEVHNAKTKPREEQYNSTYRVVSVLTVLHQDWLNGKEYKCAVSNKALPAPIEKTISKAKGQPREPQVYTLPPSRDELTKNQVSLSCAVKGFYPSDIAVEWESNGQPENNYKTTPPVLDSDGSFFLVSKLTVDKSRWQQGNVFSCSVMHEALHNHYTQKSLSLSPG

SEQ ID NO: 38 - DNA, 2118 bp, Artificial Sequence
  Synthesized
gaaatcgtccttacacaatctcctagcacactgagtgtgagccccggcgaacgcgcgactttctcttgcagggcaagtcaatccatagggactaatatacattggtatcaacaaaagccaggtaaaccacccaggcttttgattaagtatgcaagtgagtctatttccggtatccctgaccgcttctctggatcaggcagtggcacagagttcacactcaccatatctagtgtgcaatcagaggacttcgccgtgtattactgccaacagaataataactggccgactaccttcggacccggtacaaagctgaccgttttaggcggtggcggtagtgggggaggcggttctggcggcggagggtccggcggtggaggatcacaagtacagttgcagcaatccggtcccggtctcgtcaaaccgagtgagacgcttagtataacgtgtactgtttcaggctttagccttacgaactatggagttcactggattcggcaggcacccggcaaaggtttggaatggctgggtgttatttggtcaggtggaaatacagactataacaccccctttacaagtcggttcacaattacgaaagataattccaaaaatcaagtttatttcaagttgagatccgtccgcgcggacgacactgcgatctactattgtgcgagggcactgacctactacgattacgaatttgcgtattgggggcaagggactcttgtaacagtctcgagcggcggtggagggtccggcggtggtggatcagaggtgcagctggtggagtctgggggaggcttggtccagcctggggggtccctgagactctcctgtgcagcctctggattcaccatcagtaccaatgcaatgagctgggtccgccaggctccagggaaggggctggagtggatcggagtcattactggtcgtgatatcacatactacgcgagctgggcgaaaggcagattcaccatctccagagacaattccaagaacacgctgtatcttcaaatgaacagcctgagagccgaggacacggctgtgtattactgtgcgagagacggtggttcttctgctattactagtaacaacatttggggccagggaaccctggtcaccgtgtcctcagctagcaccaaaggcccctctgtgttccctctggccccctcctccaagagcacctctggaggcactgctgccctgggctgcctggtgaaggactacttcccagagcctgtgactgtgtcctggaactctggagccctgacctctggagtgcacaccttccctgctgtgctgcagagctctggcctctacagcctgtcctctgtggtcactgtgccctcctccagcctgggcacccagacctacatctgcaatgtgaaccacaagccctccaacaccaaggtggacaagagagtggagcccaagtcctgtgacaagacccacacctgccctccctgcccagccccagaggctgctggaggcccctctgtgttcctcttccctcccaagcccaaggacaccctgatgatctccaggaccccagaagtcacctgtgtggtggtggatgtgtcccatgaagacccagaagtgaagttcaactggtatgtggatggagtggaggtgcacaatgccaagaccaagcccagagaagagcagtacaactccacctaccgagtggtgtctgtgctgactgtgctgcaccaggactggctgaatgggaaggagtacaagtgtgctgtgtccaacaaggccctgcctgcccccattgagaagaccatctccaaggccaagggccagcccagagagccccaggtctacaccctgcctccctccagagatgagctgaccaagaaccaggtgtccctgtcctgtgctgtgaaaggcttctaccccagtgacattgctgtggagtgggagagcaatggccagccagagaacaactacaagaccacccctcctgtgctggactctgatggctccttcttcctggtctccaagctgactgtggacaagagccgctggcagcagggcaatgtgttctcctgctctgtcatgcatgaggccctgcacaaccactacacccagaagagcctgagcctgagccctggatga

SEQ ID NO: 39 - protein, 968 aa, Artificial Sequence; identical to SEQ ID NO: 23
  Synthesized

SEQ ID NO: 40 - DNA, 2907 bp, Artificial Sequence; identical to SEQ ID NO: 24
  Synthesized

SEQ ID NO: 41 - protein, 705 aa, Artificial Sequence; identical to SEQ ID NO: 37
  Synthesized

SEQ ID NO: 42 - DNA, 2118 bp, Artificial Sequence; identical to SEQ ID NO: 38
  Synthesized

SEQ ID NO: 43 - protein, 706 aa, Artificial Sequence; identical to SEQ ID NO: 35
  Synthesized

SEQ ID NO: 44 - DNA, 2121 bp, Artificial Sequence; identical to SEQ ID NO: 36
  Synthesized

SEQ ID NO: 45 - protein, 698 aa, Artificial Sequence
  Synthesized
EIVLTQSPSTLSVSPGERATFSCRASQSIGTNIHWYQQKPGKPPRLLIKYASESISGIPDRFSGSGSGTEFTLTISSVQSEDFAVYYCQQNNNWPTTFGPGTKLTVLGGGGSGGGGSGGGGSGGGGSQVQLQQSGPGLVKPSETLSITCTVSGFSLTNYGVHWIRQAPGKGLEWLGVIWSGGNTDYNTPFTSRFTITKDNSKNQVYFKLRSVRADDTAIYYCARALTYYDYEFAYWGQGTLVTVSSGGGGSGGGGSQVQLQESGGRLVQPGEPLSLTCKTSGIDLSSNAIGWVRQAPGKGLEWIGVIFGSGNTYYASWAKGRFTISRSTSTVYLKMNSLRSEDTAIYYCARGGYSSDIWGQGTLVTVSSASTKGPSVFPLAPSSKSTSGGTAALGCLVKDYFPEPVTVSWNSGALTSGVHTFPAVLQSSGLYSLSSVVTVPSSSLGTQTYICNVNHKPSNTKVDKRVEPKSCDKTHTCPPCPAPEAAGGPSVFLFPPKPKDTLMISRTPEVTCVVVDVSHEDPEVKFNWYVDGVEVHNAKTKPREEQYNSTYRVVSVLTVLHQDWLNGKEYKCAVSNKALPAPIEKTISKAKGQPREPQVYTLPPSRDELTKNQVSLSCAVKGFYPSDIAVEWESNGQPENNYKTTPPVLDSDGSFFLVSKLTVDKSRWQQGNVFSCSVMHEALHNHYTQKSLSLSPG

SEQ ID NO: 46 - DNA, 2097 bp, Artificial Sequence
  Synthesized
gagatcgtgctgacccagtctccttccacactgtctgtgtctcccggcgagagagccaccttcagctgtagagcctctcagtccatcggcaccaacatccactggtatcagcagaagcccggcaagcctcctcggctgctgattaagtacgcctccgagtccatcagcggcatccctgacagattctccggctctggctctggcaccgagtttaccctgaccatctcctccgtgcagtccgaggatttcgccgtgtactactgccagcagaacaacaactggcccaccacctttggacccggcaccaagctgacagttcttggcggcggaggatctggcggaggtggaagcggaggcggaggaagcggtggcggcggatctcaagttcagttgcagcagtctggccctggcctggtcaagccttctgagacactgtccatcacctgtaccgtgtccggcttctccctgaccaattacggcgtgcactggatcagacaggcccctggcaaaggactggaatggctgggagtgatttggagcggcggcaacaccgactacaacacccctttcaccagccggttcaccatcaccaaggacaactccaagaaccaggtgtacttcaagctgcggagcgtgcgggctgatgacaccgccatctactactgtgctcgggccctgacctactacgactacgagtttgcttactggggccagggcaccctggtcacagtctcgagcggcggtggagggtccggcggtggtggatcacaagtgcagttgcaagaaagtggtggtagactggttcagcctggtgaacccttgtcactgacgtgtaaaacaagcggcattgatctgtcctctaacgccatcggatgggtccgacaggccccaggaaaaggtctggagtggatcggagttatcttcgggagcggcaatacatactacgcaagctgggcaaaagggcgatttacgatatcacggagcacctctacagtttatttgaaaatgaactccctccggtccgaggataccgcgatatattactgtgccagaggggggtactcctctgatatctgggggcagggtacactggttacagtttcatccgctagcaccaaaggcccctctgtgttccctctggccccctcctccaagagcacctctggaggcactgctgccctgggctgcctggtgaaggactacttcccagagcctgtgactgtgtcctggaactctggagccctgacctctggagtgcacaccttccctgctgtgctgcagagctctggcctctacagcctgtcctctgtggtcactgtgccctcctccagcctgggcacccagacctacatctgcaatgtgaaccacaagccctccaacaccaaggtggacaagagagtggagcccaagtcctgtgacaagacccacacctgccctccctgcccagccccagaggctgctggaggcccctctgtgttcctcttccctcccaagcccaaggacaccctgatgatctccaggaccccagaagtcacctgtgtggtggtggatgtgtcccatgaagacccagaagtgaagttcaactggtatgtggatggagtggaggtgcacaatgccaagaccaagcccagagaagagcagtacaactccacctaccgagtggtgtctgtgctgactgtgctgcaccaggactggctgaatgggaaggagtacaagtgtgctgtgtccaacaaggccctgcctgcccccattgagaagaccatctccaaggccaagggccagcccagagagccccaggtctacaccctgcctccctccagagatgagctgaccaagaaccaggtgtccctgtcctgtgctgtgaaaggcttctaccccagtgacattgctgtggagtgggagagcaatggccagccagagaacaactacaagaccacccctcctgtgctggactctgatggctccttcttcctggtctccaagctgactgtggacaagagccgctggcagcagggcaatgtgttctcctgctctgtcatgcatgaggccctgcacaaccactacacccagaagagcctgagcctgagccctggatga

SEQ ID NO: 47 - protein, 704 aa, Artificial Sequence; identical to SEQ ID NO: 3
  Synthesized

SEQ ID NO: 48 - DNA, 2112 bp, Artificial Sequence; identical to SEQ ID NO: 4
  Synthesized

SEQ ID NO: 49 - protein, 698 aa, Artificial Sequence
  Synthesized
QVQLQESGGRLVQPGEPLSLTCKTSGIDLSSNAIGWVRQAPGKGLEWIGVIFGSGNTYYASWAKGRFTISRSTSTVYLKMNSLRSEDTAIYYCARGGYSSDIWGQGTLVTVSSASTKGPSVFPLAPSSKSTSGGTAALGCLVKDYFPEPVTVSWNSGALTSGVHTFPAVLQSSGLYSLSSVVTVPSSSLGTQTYICNVNHKPSNTKVDKRVEPKSCDKTHTCPPCPAPEAAGGPSVFLFPPKPKDTLMISRTPEVTCVVVDVSHEDPEVKFNWYVDGVEVHNAKTKPREEQYNSTYRVVSVLTVLHQDWLNGKEYKCAVSNKALPAPIEKTISKAKGQPREPQVYTLPPSRDELTKNQVSLSCAVKGFYPSDIAVEWESNGQPENNYKTTPPVLDSDGSFFLVSKLTVDKSRWQQGNVFSCSVMHEALHNHYTQKSLSLSPGGGGGSGGGGSQVQLQQSGPGLVKPSETLSITCTVSGFSLTNYGVHWIRQAPGKGLEWLGVIWSGGNTDYNTPFTSRFTITKDNSKNQVYFKLRSVRADDTAIYYCARALTYYDYEFAYWGQGTLVTVSSGGGGSGGGGSGGGGSGGGGSEIVLTQSPSTLSVSPGERATFSCRASQSIGTNIHWYQQKPGKPPRLLIKYASESISGIPDRFSGSGSGTEFTLTISSVQSEDFAVYYCQQNNNWPTTFGPGTKLTVL

SEQ ID NO: 50 - DNA, 2097 bp, Artificial Sequence
  Synthesized
caagtgcagttgcaagaaagtggtggtagactggttcagcctggtgaacccttgtcactgacgtgtaaaacaagcggcattgatctgtcctctaacgccatcggatgggtccgacaggccccaggaaaaggtctggagtggatcggagttatcttcgggagcggcaatacatactacgcaagctgggcaaaagggcgatttacgatatcacggagcacctctacagtttatttgaaaatgaactccctccggtccgaggataccgcgatatattactgtgccagaggggggtactcctctgatatctgggggcagggtacactggttacagtttcatccgctagcaccaaaggcccctctgtgttccctctggccccctcctccaagagcacctctggaggcactgctgccctgggctgcctggtgaaggactacttcccagagcctgtgactgtgtcctggaactctggagccctgacctctggagtgcacaccttccctgctgtgctgcagagctctggcctctacagcctgtcctctgtggtcactgtgccctcctccagcctgggcacccagacctacatctgcaatgtgaaccacaagccctccaacaccaaggtggacaagagagtggagcccaagtcctgtgacaagacccacacctgccctccctgcccagccccagaggctgctggaggcccctctgtgttcctcttccctcccaagcccaaggacaccctgatgatctccaggaccccagaagtcacctgtgtggtggtggatgtgtcccatgaagacccagaagtgaagttcaactggtatgtggatggagtggaggtgcacaatgccaagaccaagcccagagaagagcagtacaactccacctaccgagtggtgtctgtgctgactgtgctgcaccaggactggctgaatgggaaggagtacaagtgtgctgtgtccaacaaggccctgcctgcccccattgagaagaccatctccaaggccaagggccagcccagagagccccaggtctacaccctgcctccctccagagatgagctgaccaagaaccaggtgtccctgtcctgtgctgtgaaaggcttctaccccagtgacattgctgtggagtgggagagcaatggccagccagagaacaactacaagaccacccctcctgtgctggactctgatggctccttcttcctggtctccaagctgactgtggacaagagccgctggcagcagggcaatgtgttctcctgctctgtcatgcatgaggccctgcacaaccactacacccagaagagcctgagcctgagccctggaggaggaggaggctctggaggaggaggatcccaagttcagttgcagcagtctggccctggcctggtcaagccttctgagacactgtccatcacctgtaccgtgtccggcttctccctgaccaattacggcgtgcactggatcagacaggcccctggcaaaggactggaatggctgggagtgatttggagcggcggcaacaccgactacaacacccctttcaccagccggttcaccatcaccaaggacaactccaagaaccaggtgtacttcaagctgcggagcgtgcgggctgatgacaccgccatctactactgtgctcgggccctgacctactacgactacgagtttgcttactggggccagggcaccctggtcacagtttcttctggtggtggtggttcaggcggggggggttccggcggaggcggttctgggggtggaggttccgagatcgtgctgacccagtctccttccacactgtctgtgtctcccggcgagagagccaccttcagctgtagagcctctcagtccatcggcaccaacatccactggtatcagcagaagcccggcaagcctcctcggctgctgattaagtacgcctccgagtccatcagcggcatccctgacagattctccggctctggctctggcaccgagtttaccctgaccatctcctccgtgcagtccgaggatttcgccgtgtactactgccagcagaacaacaactggcccaccacctttggacccggcaccaagctgaccgtgctgtga

SEQ ID NO: 51 - protein, 699 aa, Artificial Sequence
  Synthesized
DPQLTQSPSSLSATVGQRVTINCQSSQSVAKNNNLAWFQQKPGKPPKLLIYSASTLAAGVPSRFSGSGSGTQFTLTITRVQSEDFATYYCSARDSGNIQSFGGGTRVEIKRTVAAPSVFIFPPSDEQLKSGTASVVCLLNNFYPREAKVQWKVDNALQSGNSQESVTEQDSKDSTYSLSSTLTLSKADYEKHKVYACEVTHQGLSSPVTKSFNRGECGGDKTHTCPPCPAPEAAGGPSVFLFPPKPKDTLMISRTPEVTCVVVDVSHEDPEVKFNWYVDGVEVHNAKTKPREEQYNSTYRVVSVLTVLHQDWLNGKEYKCAVSNKALPAPIEKTISKAKGQPREPQVYTLPPSRDELTKNQVSLWCLVKGFYPSDIAVEWESNGQPENNYKTTPPVLDSDGSFFLYSKLTVDKSRWQQGNVFSCSVMHEALHNRFTQKSLSLSPGGGGGSGGGGSQVQLQESGGGLVKPGGSLSLSCAASGFTFSSYWMSWVRQAPGKGLEWVANINRDGSASYYVDSVKGRFTISRDDAKNSLYLQMNSLRAEDTAVYYCARDRGVGYFDLWGRGTLVTVSSGGGGSGGGGSGGGGSQSALTQPASVSGSPGQSITISCTGTSSDVGGYNFVSWYQQHPGKAPKLMIYDVSDRPSGVSDRFSGSKSGNTASLIISGLQADDEADYYCSSYGSSSTHVIFGGGTKVTVL

SEQ ID NO: 52 - DNA, 2100 bp, Artificial Sequence
  Synthesized
gatcctcaattgacccagtcccctagtagcctttctgcaaccgtgggccagagggtaacaatcaattgccagtcaagccagtccgtagcgaagaataataatttggcatggttccaacaaaaaccgggtaaacctcctaaactccttatctactcagcttcaacccttgccgcgggtgtgcccagccggttctcaggctcaggttccgggactcaatttacacttaccatcactcgcgtccaaagtgaggattttgcaacctactattgttctgcacgggattccgggaacatacagtcctttgggggtggaactcgggtggagataaaacgtacggtggctgccccctctgtgttcatcttcccacccagtgatgagcagctgaagagtggcacagcctctgtggtgtgcctgctcaacaacttctaccccagagaagccaaggtgcagtggaaggtggacaatgccctgcagagtggcaacagccaggagagtgtgacagagcaggacagcaaggacagcacctacagcctgtcctccaccctgaccctgtccaaggctgactatgagaagcacaaggtgtatgcctgtgaggtgacccaccagggcctgagcagccctgtgaccaagagcttcaaccgaggagagtgtggaggagacaagacccacacctgccctccctgcccagccccagaagctgctggaggcccctctgtgttcctcttccctcccaagcccaaggacaccctgatgatctccaggaccccagaagtcacctgtgtggtggtggatgtgtcccatgaagacccagaagtgaagttcaactggtatgtggatggagtggaagtgcacaatgccaagaccaagcccagagaagagcagtacaacagcacctaccgagtggtgtctgtgctgactgtgctgcaccaggactggctgaatgggaaggagtacaagtgtgctgtgtccaacaaggccctgcctgcccccattgagaagaccatctccaaggccaagggccagcccagagagccccaggtctacaccctgcctccctccagagatgagctgaccaagaaccaggtgtccctgtggtgcctggtgaaaggcttctaccccagtgacattgctgtggagtgggagagcaatggccagccagagaacaactacaagaccacccctcctgtgctggactctgatggctccttcttcctgtacagcaagctgactgtggacaagagccgctggcagcagggcaatgtgttctcctgctctgtcatgcatgaggccctgcacaaccgcttcacccagaagagcctgagcctgagccctggaggaggaggaggctctggaggaggaggatcccaggtgcagctgcaggagtcggggggaggcctggtcaagcctggagggtccctgagcctctcctgtgcagcctctggattcacctttagtagttattggatgagctgggtccgccaggctccagggaaggggctggagtgggtggccaacataaaccgcgatggaagtgcgagttactatgtggactctgtgaagggccgattcaccatctccagagacgacgccaagaactcactgtatctgcaaatgaacagcctgagagctgaggacacggctgtgtattactgtgcgagagatcgtggggtgggctacttcgatctctggggccgtggcaccctggtcaccgtgtctagcggtggaggcggttcaggcggaggtggttccggcggtggcggctcccagtctgccctgactcagcctgcctccgtgtctgggtctcctggacagtcgatcaccatctcctgcactggaaccagcagtgacgttggtggttataactttgtctcctggtaccaacaacacccaggcaaagcccccaaactcatgatctatgatgtcagtgatcggccctcaggggtgtctgatcgcttctccggctccaagtctggcaacacggcctccctgatcatctctggcctccaggctgacgacgaggctgattattactgcagctcatatgggagcagcagcactcatgtgattttcggcggagggaccaaggtgaccgtcctataa

SEQ ID NO: 53 - protein, 705 aa, Artificial Sequence; identical to SEQ ID NO: 37
  Synthesized

SEQ ID NO: 54 - DNA, 2118 bp, Artificial Sequence; identical to SEQ ID NO: 38
  Synthesized

SEQ ID NO: 55 - protein, 447 aa, Artificial Sequence
  Synthesized
DVVMTQSPSTLSASVGDRVTINCQASESISSWLAWYQQKPGKAPKLLIYEASKLASGVPSRFSGSGSGTEFTLTISSLQPDDFATYYCQGYFYFISRTYVNSFGGGTKVEIKRTVAAPSVFIFPPSDEQLKSGTASVVCLLNNFYPREAKVQWKVDNALQSGNSQESVTEQDSKDSTYSLSSTLTLSKADYEKHKVYACEVTHQGLSSPVTKSFNRGECGGDKTHTCPPCPAPEAAGGPSVFLFPPKPKDTLMISRTPEVTCVVVDVSHEDPEVKFNWYVDGVEVHNAKTKPREEQYNSTYRVVSVLTVLHQDWLNGKEYKCAVSNKALPAPIEKTISKAKGQPREPQVYTLPPSRDELTKNQVSLWCLVKGFYPSDIAVEWESNGQPENNYKTTPPVLDSDGSFFLYSKLTVDKSRWQQGNVFSCSVMHEALHNRFTQKSLSLSPG

SEQ ID NO: 56 - DNA, 1344 bp, Artificial Sequence
  Synthesized
gacgtggtcatgacacagagcccttccacactgtctgcctccgtgggcgatagagtgaccatcaactgtcaggcctccgagtccatctcctcttggctggcttggtatcagcagaagcctggcaaggcccctaagctgctgatctacgaggcttccaagctggcctctggcgtgccctctagattttccggctctggctctggcaccgagtttaccctgacaatctccagcctgcagcctgacgacttcgccacctactactgccaaggctacttctacttcatctcccggacctacgtgaactccttcggcggaggcaccaaggtggagatcaagcgtacggtggctgccccctctgtgttcatcttcccacccagtgatgagcagctgaagagtggcacagcctctgtggtgtgcctgctcaacaacttctaccccagagaagccaaggtgcagtggaaggtggacaatgccctgcagagtggcaacagccaggagagtgtgacagagcaggacagcaaggacagcacctacagcctgtcctccaccctgaccctgtccaaggctgactatgagaagcacaaggtgtatgcctgtgaggtgacccaccagggcctgagcagccctgtgaccaagagcttcaaccgaggagagtgtggaggagacaagacccacacctgccctccctgcccagccccagaagctgctggaggcccctctgtgttcctcttccctcccaagcccaaggacaccctgatgatctccaggaccccagaagtcacctgtgtggtggtggatgtgtcccatgaagacccagaagtgaagttcaactggtatgtggatggagtggaagtgcacaatgccaagaccaagcccagagaagagcagtacaacagcacctaccgagtggtgtctgtgctgactgtgctgcaccaggactggctgaatgggaaggagtacaagtgtgctgtgtccaacaaggccctgcctgcccccattgagaagaccatctccaaggccaagggccagcccagagagccccaggtctacaccctgcctccctccagagatgagctgaccaagaaccaggtgtccctgtggtgcctggtgaaaggcttctaccccagtgacattgctgtggagtgggagagcaatggccagccagagaacaactacaagaccacccctcctgtgctggactctgatggctccttcttcctgtacagcaagctgactgtggacaagagccgctggcagcagggcaatgtgttctcctgctctgtcatgcatgaggccctgcacaaccgcttcacccagaagagcctgagcctgagccctggatga

SEQ ID NO: 57 - protein, 449 aa, Artificial Sequence
  Synthesized
EVQLVESGGGLVQPGGSLRLSCAASGFTISTNAMSWVRQAPGKGLEWIGVITGRDITYYASWAKGRFTISRDNSKNTLYLQMNSLRAEDTAVYYCARDGGSSAITSNNIWGQGTLVTVSSASTKGPSVFPLAPSSKSTSGGTAALGCLVKDYFPEPVTVSWNSGALTSGVHTFPAVLQSSGLYSLSSVVTVPSSSLGTQTYICNVNHKPSNTKVDKRVEPKSCDKTHTCPPCPAPEAAGGPSVFLFPPKPKDTLMISRTPEVTCVVVDVSHEDPEVKFNWYVDGVEVHNAKTKPREEQYNSTYRVVSVLTVLHQDWLNGKEYKCAVSNKALPAPIEKTISKAKGQPREPQVYTLPPSRDELTKNQVSLSCAVKGFYPSDIAVEWESNGQPENNYKTTPPVLDSDGSFFLVSKLTVDKSRWQQGNVFSCSVMHEALHNHYTQKSLSLSPG

SEQ ID NO: 58 - DNA, 1350 bp, Artificial Sequence
  Synthesized
gaggtgcagctggttgaatctggcggaggattggttcagcctggcggctctctgagactgtcttgtgccgcttctggcttcaccatctccaccaacgccatgtcctgggtccgacaggctcctggcaaaggcctggaatggatcggcgtgatcaccggcagagatattacctactacgcctcctgggccaagggcagattcaccatcagccgggacaactccaagaacaccctgtacctgcagatgaactccctgagagccgaggacaccgccgtgtactactgtgctagagatggcggcagcagcgccatcacctccaacaatatttggggccagggcaccctggtcactgtgtcctctgctagcaccaaaggcccctctgtgttccctctggccccctcctccaagagcacctctggaggcactgctgccctgggctgcctggtgaaggactacttcccagagcctgtgactgtgtcctggaactctggagccctgacctctggagtgcacaccttccctgctgtgctgcagagctctggcctctacagcctgtcctctgtggtcactgtgccctcctccagcctgggcacccagacctacatctgcaatgtgaaccacaagccctccaacaccaaggtggacaagagagtggagcccaagtcctgtgacaagacccacacctgccctccctgcccagccccagaggctgctggaggcccctctgtgttcctcttccctcccaagcccaaggacaccctgatgatctccaggaccccagaagtcacctgtgtggtggtggatgtgtcccatgaagacccagaagtgaagttcaactggtatgtggatggagtggaggtgcacaatgccaagaccaagcccagagaagagcagtacaactccacctaccgagtggtgtctgtgctgactgtgctgcaccaggactggctgaatgggaaggagtacaagtgtgctgtgtccaacaaggccctgcctgcccccattgagaagaccatctccaaggccaagggccagcccagagagccccaggtctacaccctgcctccctccagagatgagctgaccaagaaccaggtgtccctgtcctgtgctgtgaaaggcttctaccccagtgacattgctgtggagtgggagagcaatggccagccagagaacaactacaagaccacccctcctgtgctggactctgatggctccttcttcctggtctccaagctgactgtggacaagagccgctggcagcagggcaatgtgttctcctgctctgtcatgcatgaggccctgcacaaccactacacccagaagagcctgagcctgagccctggatga

SEQ ID NO: 59 - protein, 706 aa, Artificial Sequence; identical to SEQ ID NO: 35
  Synthesized

SEQ ID NO: 60 - DNA, 2121 bp, Artificial Sequence; identical to SEQ ID NO: 36
  Synthesized

SEQ ID NO: 61 - protein, 449 aa, Artificial Sequence; identical to SEQ ID NO: 57
  Synthesized

SEQ ID NO: 62 - DNA, 1350 bp, Artificial Sequence; identical to SEQ ID NO: 58
  Synthesized

SEQ ID NO: 63 - protein, 447 aa, Artificial Sequence; identical to SEQ ID NO: 55
  Synthesized

SEQ ID NO: 64 - DNA, 1344 bp, Artificial Sequence; identical to SEQ ID NO: 56
  Synthesized

SEQ ID NO: 65 - protein, 442 aa, Artificial Sequence; identical to SEQ ID NO: 1
  Synthesized

SEQ ID NO: 66 - DNA, 1326 bp, Artificial Sequence; identical to SEQ ID NO: 2
  Synthesized

SEQ ID NO: 67 - protein, 445 aa, Artificial Sequence
  Synthesized
DPQLTQSPSSLSATVGQRVTINCQSSQSVAKNNNLAWFQQKPGKPPKLLIYSASTLAAGVPSRFSGSGSGTQFTLTITRVQSEDFATYYCSARDSGNIQSFGGGTRVEIKRTVAAPSVFIFPPSDEQLKSGTASVVCLLNNFYPREAKVQWKVDNALQSGNSQESVTEQDSKDSTYSLSSTLTLSKADYEKHKVYACEVTHQGLSSPVTKSFNRGECGGDKTHTCPPCPAPEAAGGPSVFLFPPKPKDTLMISRTPEVTCVVVDVSHEDPEVKFNWYVDGVEVHNAKTKPREEQYNSTYRVVSVLTVLHQDWLNGKEYKCAVSNKALPAPIEKTISKAKGQPREPQVYTLPPSRDELTKNQVSLWCLVKGFYPSDIAVEWESNGQPENNYKTTPPVLDSDGSFFLYSKLTVDKSRWQQGNVFSCSVMHEALHNRFTQKSLSLSPG

SEQ ID NO: 68 - DNA, 1338 bp, Artificial Sequence
  Synthesized
gatcctcaattgacccagtcccctagtagcctttctgcaaccgtgggccagagggtaacaatcaattgccagtcaagccagtccgtagcgaagaataataatttggcatggttccaacaaaaaccgggtaaacctcctaaactccttatctactcagcttcaacccttgccgcgggtgtgcccagccggttctcaggctcaggttccgggactcaatttacacttaccatcactcgcgtccaaagtgaggattttgcaacctactattgttctgcacgggattccgggaacatacagtcctttgggggtggaactcgggtggagataaaacgtacggtggctgccccctctgtgttcatcttcccacccagtgatgagcagctgaagagtggcacagcctctgtggtgtgcctgctcaacaacttctaccccagagaagccaaggtgcagtggaaggtggacaatgccctgcagagtggcaacagccaggagagtgtgacagagcaggacagcaaggacagcacctacagcctgtcctccaccctgaccctgtccaaggctgactatgagaagcacaaggtgtatgcctgtgaggtgacccaccagggcctgagcagccctgtgaccaagagcttcaaccgaggagagtgtggaggagacaagacccacacctgccctccctgcccagccccagaagctgctggaggcccctctgtgttcctcttccctcccaagcccaaggacaccctgatgatctccaggaccccagaagtcacctgtgtggtggtggatgtgtcccatgaagacccagaagtgaagttcaactggtatgtggatggagtggaagtgcacaatgccaagaccaagcccagagaagagcagtacaacagcacctaccgagtggtgtctgtgctgactgtgctgcaccaggactggctgaatgggaaggagtacaagtgtgctgtgtccaacaaggccctgcctgcccccattgagaagaccatctccaaggccaagggccagcccagagagccccaggtctacaccctgcctccctccagagatgagctgaccaagaaccaggtgtccctgtggtgcctggtgaaaggcttctaccccagtgacattgctgtggagtgggagagcaatggccagccagagaacaactacaagaccacccctcctgtgctggactctgatggctccttcttcctgtacagcaagctgactgtggacaagagccgctggcagcagggcaatgtgttctcctgctctgtcatgcatgaggccctgcacaaccgcttcacccagaagagcctgagcctgagccctggatga

SEQ ID NO: 69 - protein, 962 aa, Artificial Sequence; identical to SEQ ID NO: 25
  Synthesized

SEQ ID NO: 70 - DNA, 2889 bp, Artificial Sequence; identical to SEQ ID NO: 34
  Synthesized

SEQ ID NO: 71 - protein, 965 aa, Artificial Sequence
  Synthesized
ENVLTQSPASLSASPGERVTITCSASSSVSYMHWYQQKPGQAPKLWIYDTSKLASGVPSRFSGSGSGNDHTLTISSMEPEDFATYYCFQGSVYPFTFGQGTKVTVLGGGGSGGGGSGGGGSGGGGSQVTLKESGPGLVQPGQTLSLTCAFSGFSLSTSGMGVGWIRQPPGKGLEWLAHIWWDDDKRYNPALKSRLTISKDTSKNQVYLQMNSLDAEDTAVYYCARMELWSYYFDYWGQGTLVTVSSGGGGSGGGGSDVVMTQSPSTLSASVGDRVTINCQASESISSWLAWYQQKPGKAPKLLIYEASKLASGVPSRFSGSGSGTEFTLTISSLQPDDFATYYCQGYFYFISRTYVNSFGGGTKVEIKRTVAAPSVFIFPPSDEQLKSGTASVVCLLNNFYPREAKVQWKVDNALQSGNSQESVTEQDSKDSTYSLSSTLTLSKADYEKHKVYACEVTHQGLSSPVTKSFNRGECGGDKTHTCPPCPAPEAAGGPSVFLFPPKPKDTLMISRTPEVTCVVVDVSHEDPEVKFNWYVDGVEVHNAKTKPREEQYNSTYRVVSVLTVLHQDWLNGKEYKCAVSNKALPAPIEKTISKAKGQPREPQVYTLPPSRDELTKNQVSLWCLVKGFYPSDIAVEWESNGQPENNYKTTPPVLDSDGSFFLYSKLTVDKSRWQQGNVFSCSVMHEALHNRFTQKSLSLSPGGGGGSGGGGSDIQMTQSPSTLSASVGDRVTITCQASQSISSHLNWYQQKPGKAPKLLIYKASTLASGVPSRFSGSGSGTEFTLTISSLQPDDFATYYCQQGYSWGNVDNVFGGGTKVTVLGGGGSGGGGSGGGGSGGGGSEVQLLESGGGLVQPGGSLSLSCAASGFSFSSGYDMCWVRQAPGKGLEWIACIAAGSAGITYDANWAKGRFTISRDNSKNTLYLQMNSLRAEDTAVYYCARSAFSFDYAMDLWGQGTLVTVSS

SEQ ID NO: 72 - DNA, 2898 bp, Artificial Sequence
  Synthesized
gaaaatgtattgacacagagccccgcctccctcagtgcctcacctggggaaagggtaactatcacttgctctgcatcaagcagcgtctcatacatgcattggtatcaacaaaagcctggacaggcccccaagctctggatatacgatacgagcaagctggcttccggcgtacctagccgcttcagtggttccggctcaggcaacgatcacacccttacgatttccagtatggaacccgaagattttgcaacttattattgtttccaggggagcgtgtacccattcactttcgggcaggggacaaaagtgaccgtcctaggcggtggcggtagtgggggaggcggttctggcggcggagggtccggcggtggaggatcacaggtcacattgaaggaatctggccccggccttgttcagccaggacagacccttagcctcacctgtgccttcagtggtttttctcttagcactagcggtatgggggtcggctggattcggcagcctcccggcaaaggtcttgagtggttggctcacatttggtgggacgacgacaaacggtataatcctgccttgaaaagtcggctgaccattagtaaggatacctcaaaaaatcaagtgtacttgcaaatgaatagccttgacgccgaggatacggctgtatattattgcgcgcggatggaactctggtcttactactttgattattgggggcaggggactctcgtcacggtctcgagcggcggtggagggtccggcggtggtggatcagacgtcgtgatgacccagtctccttccaccctgtctgcatctgtaggagacagagtcaccatcaattgccaagccagtgagagcattagcagttggttagcctggtatcagcagaaaccagggaaagcccctaagctcctgatctatgaagcatccaaactggcatctggggtcccatcaaggttcagcggcagtggatctgggacagaattcactctcaccatcagcagcctgcagcctgatgattttgcaacttattactgccaaggctatttttattttattagtcgtacttatgtaaattctttcggcggagggaccaaggtggagatcaaacgtacggtggctgcaccatctgtcttcatcttcccgccatctgatgagcagttgaaatctggaactgcctctgttgtgtgcctgctgaataacttctatcccagagaggccaaagtacagtggaaggtggataacgccctccaatcgggtaactcccaggagagtgtcacagagcaggacagcaaggacagcacctacagcctcagcagcaccctgacgctgagcaaagcagactacgagaaacacaaagtctacgcctgcgaagtcacccatcagggcctgagctcgcccgtcacaaagagcttcaacaggggagagtgtggaggcgacaaaactcacacatgcccaccgtgcccagcacctgaagccgcggggggaccgtcagtcttcctcttccccccaaaacccaaggacaccctcatgatctcccggacccctgaggtcacatgcgtggtggtggacgtgagccacgaagaccctgaggtcaagttcaactggtacgtggacggcgtggaggtgcataatgccaagacaaagccgcgggaggagcagtacaacagcacgtaccgtgtggtcagcgtcctcaccgtcctgcaccaggactggctgaatggcaaggagtacaagtgcgcggtctccaacaaagccctcccagcccccatcgagaaaaccatctccaaagccaaagggcagccccgagaaccacaggtgtacaccctgcccccaagccgggatgagctgaccaagaaccaggtcagcctgtggtgcctggtcaaaggcttctatcccagcgacatcgccgtggagtgggagagcaatgggcagccggagaacaactacaagaccacgcctcccgtgctggactccgacggctccttcttcctctatagcaagctcaccgtggacaagagcaggtggcagcaggggaacgtcttctcatgctccgtgatgcatgaggctctgcacaacagattcacgcagaagagcctctccctgtctccgggtggcggtggagggtccggcggtggtggatccgacattcagatgacacagtcaccgtctacgctctcagcctcagtaggcgatagggtgactatcacctgccaagcctcccaatctataagttcacacctcaactggtatcaacagaaacccggtaaagcaccgaagctgctcatctacaaggcatcaactcttgcctcaggtgtgcctagtcgcttctccgggagcggctccggtactgagtttactttgacgatatcttccctccaacccgacgacttcgccacatactattgtcagcagggttatagttggggaaatgttgacaatgtgtttggagggggaacgaaagtgactgtgttgggagggggaggaagtggcggcggcggaagcggaggtggtggctccggcgggggtggaagcgaagtgcaattgctcgaaagtggtggcggacttgtgcaacctggtggaagcctctcactctcttgcgcggcgagtggttttagcttcagtagcggctacgatatgtgctgggtaagacaggctcctggtaaaggccttgagtggattgcgtgtatcgccgccgggtctgctggtataacatacgatgcaaactgggcgaaagggcgcttcacaatctccagggacaactcaaaaaatacattgtacctccagatgaatagcctgagagccgaagacaccgcagtctactattgcgcaaggtcagcatttagcttcgattatgcaatggatctttggggccaggggacgctcgtcaccgtctcatcttga

SEQ ID NO: 73 - protein, 967 aa, Artificial Sequence; identical to SEQ ID NO: 17
  Synthesized

SEQ ID NO: 74 - DNA, 2904 bp, Artificial Sequence
  Synthesized
gacgtcgtgatgacccagtctccttccaccctgtctgcatctgtaggagacagagtcaccatcaattgccaagccagtgagagcattagcagttggttagcctggtatcagcagaaaccagggaaagcccctaagctcctgatctatgaagcatccaaactggcatctggggtcccatcaaggttcagcggcagtggatctgggacagaatttactctcaccatcagcagcctgcagcctgatgattttgcaacttattactgccaaggctatttttattttattagtcgtacttatgtaaattctttcggcggagggaccaaggtggagatcaaaggcggtggcggtagtgggggaggcggttctggcggcggagggtccggcggtggaggatcagaggtgcagctggtggagtctgggggaggcttggtccagcctggggggtccctgagactctcctgtgcagcctctggattcaccatcagtaccaatgcaatgagctgggtccgccaggctccagggaaggggctggagtggatcggagtcattactggtcgtgatatcacatactacgcgagctgggcgaaaggcagattcaccatctccagagacaattccaagaacacgctgtatcttcaaatgaacagcctgagagccgaggacacggctgtgtattactgtgcgagagacggtggttcttctgctattactagtaacaacatttggggccagggaaccctggtcaccgtctcgagtggcggtggagggtccggcggtggtggatcacaagtacagttgcagcaatccggtcccggtctcgtcaaaccgagtgagacgcttagtataacgtgtactgtttcaggctttagccttacgaactatggagttcactggattcggcaggcacccggcaaaggtttggaatggctgggtgttatttggtcaggtggaaatacagactataacaccccctttacaagtcggttcacaattacgaaagataattccaaaaatcaagtttatttcaagttgagatccgtccgcgcggacgacactgcgatctactattgtgcgagggcactgacctactacgattacgaatttgcgtattgggggcaagggactcttgtaacagtctccagtgctagcaccaagggcccatcggtcttccccctggcaccctcctccaagagcacctctgggggcacagcggccctgggctgcctggtcaaggactacttccccgaaccggtgacggtgtcgtggaactcaggcgccctgaccagcggcgtgcacaccttcccggctgtcctacagtcctcaggactctactccctcagcagcgtggtgaccgtgccctccagcagcttgggcacccagacctacatctgcaacgtgaatcacaagcccagcaacaccaaggtggacaagagagttgagcccaaatcttgtgacaaaactcacacatgcccaccgtgcccagcacctgaagccgcggggggaccgtcagtcttcctcttccccccaaaacccaaggacaccctcatgatctcccggacccctgaggtcacatgcgtggtggtggacgtgagccacgaagaccctgaggtcaagttcaactggtacgtggacggcgtggaggtgcataatgccaagacaaagccgcgggaggagcagtacaacagcacgtaccgtgtggtcagcgtcctcaccgtcctgcaccaggactggctgaatggcaaggagtacaagtgcgcggtctccaacaaagccctcccagcccccatcgagaaaaccatctccaaagccaaagggcagccccgagaaccacaggtgtataccctgcccccatcccgggatgagctgaccaagaaccaggtcagcctgtcctgcgccgtcaaaggcttctatcccagcgacatcgccgtggagtgggagagcaatgggcagccggagaacaactacaagaccacgcctcccgtgctggactccgacggctccttcttcctcgtgagcaagctcaccgtggacaagagcaggtggcagcaggggaacgtcttctcatgctccgtgatgcatgaggctctgcacaaccactacacgcagaagagcctctccctgtctccgggtggcggcggcggttcaggtggtgggggatccgacgttgtgatgacgcagtctcctagttcagtatcagcgtctgttggggatcgagtcacgattacatgccaggcgagccaaaatattaggacgtatctgtcttggtatcaacaaaagcctggtaaggctccaaaactcctcatttacgccgctgccaacttggctagtggagtaccttcacgctttagtgggtcaggttctggaacagattttacgttgacgatctccgatttggaaccaggggacgctgccacgtattattgccagtccacctacctcgggactgactacgttggtggggcgtttggcggaggaacaaaactcactgtacttggtggtggtggttcaggcggggggggttccggcggaggcggttctgggggtggaggttccgaggttcagttggttgaaagtggggggggactcgttcagcctggaggctctttgcgactttcttgtaccgcttctgggttcactataagttcatatcatatgcaatgggtaagacaggcgcctggtaagggacttgaatacataggaacaataagctctggtggtaacgtctattacgcctcatccgcgcgggggaggtttacaatttccaggccttctagcaaaaacacggtagatctgcaaatgaactctcttcgcgctgaagatacagcagtctactactgcgccagggattcagggtattctgaccccatgtgggggcagggcacattggttaccgtgtcctcttga

SEQ ID NO: 75 - protein, 960 aa, Artificial Sequence
  Synthesized
ENVLTQSPASLSASPGERVTITCSASSSVSYMHWYQQKPGQAPKLWIYDTSKLASGVPSRFSGSGSGNDHTLTISSMEPEDFATYYCFQGSVYPFTFGQGTKVTVLGGGGSGGGGSGGGGSGGGGSQVTLKESGPGLVQPGQTLSLTCAFSGFSLSTSGMGVGWIRQPPGKGLEWLAHIWWDDDKRYNPALKSRLTISKDTSKNQVYLQMNSLDAEDTAVYYCARMELWSYYFDYWGQGTLVTVSSGGGGSGGGGSEIVLTQSPSTLSVSPGERATFSCRASQSIGTNIHWYQQKPGKPPRLLIKYASESISGIPDRFSGSGSGTEFTLTISSVQSEDFAVYYCQQNNNWPTTFGPGTKLTVLRTVAAPSVFIFPPSDEQLKSGTASVVCLLNNFYPREAKVQWKVDNALQSGNSQESVTEQDSKDSTYSLSSTLTLSKADYEKHKVYACEVTHQGLSSPVTKSFNRGECGGDKTHTCPPCPAPEAAGGPSVFLFPPKPKDTLMISRTPEVTCVVVDVSHEDPEVKFNWYVDGVEVHNAKTKPREEQYNSTYRVVSVLTVLHQDWLNGKEYKCAVSNKALPAPIEKTISKAKGQPREPQVYTLPPSRDELTKNQVSLWCLVKGFYPSDIAVEWESNGQPENNYKTTPPVLDSDGSFFLYSKLTVDKSRWQQGNVFSCSVMHEALHNRFTQKSLSLSPGGGGGSGGGGSDIQMTQSPSTLSASVGDRVTITCQASQSISSHLNWYQQKPGKAPKLLIYKASTLASGVPSRFSGSGSGTEFTLTISSLQPDDFATYYCQQGYSWGNVDNVFGGGTKVTVLGGGGSGGGGSGGGGSGGGGSEVQLLESGGGLVQPGGSLSLSCAASGFSFSSGYDMCWVRQAPGKGLEWIACIAAGSAGITYDANWAKGRFTISRDNSKNTLYLQMNSLRAEDTAVYYCARSAFSFDYAMDLWGQGTLVTVSS

SEQ ID NO: 76 - DNA, 2883 bp, Artificial Sequence
  Synthesized
gaaaatgtattgacacagagccccgcctccctcagtgcctcacctggggaaagggtaactatcacttgctctgcatcaagcagcgtctcatacatgcattggtatcaacaaaagcctggacaggcccccaagctctggatatacgatacgagcaagctggcttccggcgtacctagccgcttcagtggttccggctcaggcaacgatcacacccttacgatttccagtatggaacccgaagattttgcaacttattattgtttccaggggagcgtgtacccattcactttcgggcaggggacaaaagtgaccgtcctaggcggtggcggtagtgggggaggcggttctggcggcggagggtccggcggtggaggatcacaggtcacattgaaggaatctggccccggccttgttcagccaggacagacccttagcctcacctgtgccttcagtggtttttctcttagcactagcggtatgggggtcggctggattcggcagcctcccggcaaaggtcttgagtggttggctcacatttggtgggacgacgacaaacggtataatcctgccttgaaaagtcggctgaccattagtaaggatacctcaaaaaatcaagtgtacttgcaaatgaatagccttgacgccgaggatacggctgtatattattgcgcgcggatggaactctggtcttactactttgattattgggggcaggggactctcgtcacggtctcgagtggcggtggagggtccggcggtggtggatcagaaatcgtccttacacaatctcctagcacactgagtgtgagccccggcgaacgcgcgactttctcttgcagggcaagtcaatccatagggactaatatacattggtatcaacaaaagccaggtaaaccacccaggcttttgattaagtatgcaagtgagtctatttccggtatccctgaccgcttctctggatcaggcagtggcacagagttcacactcaccatatctagtgtgcaatcagaggacttcgccgtgtattactgccaacagaataataactggccgactaccttcggacccggtacaaagctgaccgttttacgtacggtggctgcaccatctgtcttcatcttcccgccatctgatgagcagttgaaatctggaactgcctctgttgtgtgcctgctgaataacttctatcccagagaggccaaagtacagtggaaggtggataacgccctccaatcgggtaactcccaggagagtgtcacagagcaggacagcaaggacagcacctacagcctcagcagcaccctgacgctgagcaaagcagactacgagaaacacaaagtctacgcctgcgaagtcacccatcagggcctgagctcgcccgtcacaaagagcttcaacaggggagagtgtggaggcgacaaaactcacacatgcccaccgtgcccagcacctgaagccgcggggggaccgtcagtcttcctcttccccccaaaacccaaggacaccctcatgatctcccggacccctgaggtcacatgcgtggtggtggacgtgagccacgaagaccctgaggtcaagttcaactggtacgtggacggcgtggaggtgcataatgccaagacaaagccgcgggaggagcagtacaacagcacgtaccgtgtggtcagcgtcctcaccgtcctgcaccaggactggctgaatggcaaggagtacaagtgcgcggtctccaacaaagccctcccagcccccatcgagaaaaccatctccaaagccaaagggcagccccgagaaccacaggtgtacaccctgcccccaagccgggatgagctgaccaagaaccaggtcagcctgtggtgcctggtcaaaggcttctatcccagcgacatcgccgtggagtgggagagcaatgggcagccggagaacaactacaagaccacgcctcccgtgctggactccgacggctccttcttcctctatagcaagctcaccgtggacaagagcaggtggcagcaggggaacgtcttctcatgctccgtgatgcatgaggctctgcacaacagattcacgcagaagagcctctccctgtctccgggtggcggtggagggtccggcggtggtggatccgacattcagatgacacagtcaccgtctacgctctcagcctcagtaggcgatagggtgactatcacctgccaagcctcccaatctataagttcacacctcaactggtatcaacagaaacccggtaaagcaccgaagctgctcatctacaaggcatcaactcttgcctcaggtgtgcctagtcgcttctccgggagcggctccggtactgagtttactttgacgatatcttccctccaacccgacgacttcgccacatactattgtcagcagggttatagttggggaaatgttgacaatgtgtttggagggggaacgaaagtgactgtgttgggagggggaggaagtggcggcggcggaagcggaggtggtggctccggcgggggtggaagcgaagtgcaattgctcgaaagtggtggcggacttgtgcaacctggtggaagcctctcactctcttgcgcggcgagtggttttagcttcagtagcggctacgatatgtgctgggtaagacaggctcctggtaaaggccttgagtggattgcgtgtatcgccgccgggtctgctggtataacatacgatgcaaactgggcgaaagggcgcttcacaatctccagggacaactcaaaaaatacattgtacctccagatgaatagcctgagagccgaagacaccgcagtctactattgcgcaaggtcagcatttagcttcgattatgcaatggatctttggggccaggggacgctcgtcaccgtctcatcttga

SEQ ID NO: 77 - protein, 967 aa, Artificial Sequence
  Synthesized
EIVMTQSPSTLSASVGDRVIITCQASESISSWLAWYQQKPGKAPKLLIYEASKLASGVPSRFSGSGSGAEFTLTISSLQPDDFATYYCQGYFYFISRTYVNSFGQGTKLTVLGGGGSGGGGSGGGGSGGGGSEVQLVESGGGLVQPGGSLRLSCAASGFTISTNAMSWVRQAPGKGLEWVGVITGRDITYYASWAKGRFTISRDTSKNTVYLQMNSLRAEDTAVYYCARDGGSSAITSNNIWGQGTLVTVSSGGGGSGGGGSQVQLQQSGPGLVKPSETLSITCTVSGFSLTNYGVHWIRQAPGKGLEWLGVIWSGGNTDYNTPFTSRFTITKDNSKNQVYFKLRSVRADDTAIYYCARALTYYDYEFAYWGQGTLVTVSSASTKGPSVFPLAPSSKSTSGGTAALGCLVKDYFPEPVTVSWNSGALTSGVHTFPAVLQSSGLYSLSSVVTVPSSSLGTQTYICNVNHKPSNTKVDKRVEPKSCDKTHTCPPCPAPEAAGGPSVFLFPPKPKDTLMISRTPEVTCVVVDVSHEDPEVKFNWYVDGVEVHNAKTKPREEQYNSTYRVVSVLTVLHQDWLNGKEYKCAVSNKALPAPIEKTISKAKGQPREPQVYTLPPSRDELTKNQVSLSCAVKGFYPSDIAVEWESNGQPENNYKTTPPVLDSDGSFFLVSKLTVDKSRWQQGNVFSCSVMHEALHNHYTQKSLSLSPGGGGGSGGGGSDVVMTQSPSSVSASVGDRVTITCQASQNIRTYLSWYQQKPGKAPKLLIYAAANLASGVPSRFSGSGSGTDFTLTISDLEPGDAATYYCQSTYLGTDYVGGAFGGGTKLTVLGGGGSGGGGSGGGGSGGGGSEVQLVESGGGLVQPGGSLRLSCTASGFTISSYHMQWVRQAPGKGLEYIGTISSGGNVYYASSARGRFTISRPSSKNTVDLQMNSLRAEDTAVYYCARDSGYSDPMWGQGTLVTVSS

SEQ ID NO: 78 - DNA, 2904 bp, Artificial Sequence
  Synthesized
gaaatcgttatgacgcagagtccctccacgctctccgctagtgtcggggatcgcgtcattatcacatgccaggcctccgagtcaatcagcagctggcttgcatggtatcaacagaagccgggaaaagctcctaaattgctgatctatgaagcgtcaaaattggcgtctggtgtcccatctaggttctccggctctgggtctggtgcggaatttactttgacaatctccagtcttcaaccagacgatttcgctacctactactgccaagggtatttctattttataagccggacatatgtaaactccttcggccaaggaacaaagttgactgttcttggtggcggaggcagtggtggcgggggcagcggaggtggtggttcagggggtggtgggagcgaagtccaattggtagaaagtggcggtggtctggtgcaacctggtggatctcttcgcctctcatgcgccgctagtggctttactatttcaactaatgcgatgagctgggttcgccaggcccccggcaaaggacttgagtgggtcggcgtcatcaccggcagggacattacatactatgcgagttgggcaaagggcaggttcacgattagccgcgatacttcaaagaataccgtttaccttcaaatgaatagcttgagggcggaagacacagctgtgtattactgcgcgagggatggaggtagttccgccataacttccaacaacatatggggacaaggcacgctggttactgtctcgagtggcggtggagggtccggcggtggtggatcacaagtacagttgcagcaatccggtcccggtctcgtcaaaccgagtgagacgcttagtataacgtgtactgtttcaggctttagccttacgaactatggagttcactggattcggcaggcacccggcaaaggtttggaatggctgggtgttatttggtcaggtggaaatacagactataacaccccctttacaagtcggttcacaattacgaaagataattccaaaaatcaagtttatttcaagttgagatccgtccgcgcggacgacactgcgatctactattgtgcgagggcactgacctactacgattacgaatttgcgtattgggggcaagggactcttgtaacagtctccagtgctagcaccaagggcccatcggtcttccccctggcaccctcctccaagagcacctctgggggcacagcggccctgggctgcctggtcaaggactacttccccgaaccggtgacggtgtcgtggaactcaggcgccctgaccagcggcgtgcacaccttcccggctgtcctacagtcctcaggactctactccctcagcagcgtggtgaccgtgccctccagcagcttgggcacccagacctacatctgcaacgtgaatcacaagcccagcaacaccaaggtggacaagagagttgagcccaaatcttgtgacaaaactcacacatgcccaccgtgcccagcacctgaagccgcggggggaccgtcagtcttcctcttccccccaaaacccaaggacaccctcatgatctcccggacccctgaggtcacatgcgtggtggtggacgtgagccacgaagaccctgaggtcaagttcaactggtacgtggacggcgtggaggtgcataatgccaagacaaagccgcgggaggagcagtacaacagcacgtaccgtgtggtcagcgtcctcaccgtcctgcaccaggactggctgaatggcaaggagtacaagtgcgcggtctccaacaaagccctcccagcccccatcgagaaaaccatctccaaagccaaagggcagccccgagaaccacaggtgtataccctgcccccatcccgggatgagctgaccaagaaccaggtcagcctgtcctgcgccgtcaaaggcttctatcccagcgacatcgccgtggagtgggagagcaatgggcagccggagaacaactacaagaccacgcctcccgtgctggactccgacggctccttcttcctcgtgagcaagctcaccgtggacaagagcaggtggcagcaggggaacgtcttctcatgctccgtgatgcatgaggctctgcacaaccactacacgcagaagagcctctccctgtctccgggtggcggcggcggttcaggtggtgggggatccgacgttgtgatgacgcagtctcctagttcagtatcagcgtctgttggggatcgagtcacgattacatgccaggcgagccaaaatattaggacgtatctgtcttggtatcaacaaaagcctggtaaggctccaaaactcctcatttacgccgctgccaacttggctagtggagtaccttcacgctttagtgggtcaggttctggaacagattttacgttgacgatctccgatttggaaccaggggacgctgccacgtattattgccagtccacctacctcgggactgactacgttggtggggcgtttggcggaggaacaaaactcactgtacttggtggtggtggttcaggcggggggggttccggcggaggcggttctgggggtggaggttccgaggttcagttggttgaaagtggggggggactcgttcagcctggaggctctttgcgactttcttgtaccgcttctgggttcactataagttcatatcatatgcaatgggtaagacaggcgcctggtaagggacttgaatacataggaacaataagctctggtggtaacgtctattacgcctcatccgcgcgggggaggtttacaatttccaggccttctagcaaaaacacggtagatctgcaaatgaactctcttcgcgctgaagatacagcagtctactactgcgccagggattcagggtattctgaccccatgtgggggcagggcacattggttaccgtgtcctcttga

SEQ ID NO: 79 - protein, 960 aa, Artificial Sequence; identical to SEQ ID NO: 75
  Synthesized

SEQ ID NO: 80 - DNA, 2883 bp, Artificial Sequence; identical to SEQ ID NO: 76
  Synthesized

SEQ ID NO: 81 - protein, 965 aa, Artificial Sequence
  Synthesized
DVQMTQSPSTLSATVGQRVTINCQASESISSWLAWYQQKPGQPPKLLIYEASKLASGVPSRFSGSGSGTEFTLTISSLQSDDFATYYCQGYFYFISRTYVNSFGGGTRVEIKGGGGSGGGGSGGGGSGGGGSQQLLESGGRLIKPGATLRLTCKTSGFTISTNAMSWVRQPPGKGLEWIGVITGRDITYYASWAKGRFTISKTSINTVFLQMRSLRAEDTAVYYCARDGGSSAITSNNIWGRGTLVTVSSGGGGSGGGGSQVQLQQSGPGLVKPSETLSITCTVSGFSLTNYGVHWIRQAPGKGLEWLGVIWSGGNTDYNTPFTSRFTITKDNSKNQVYFKLRSVRADDTAIYYCARALTYYDYEFAYWGQGTLVTVSSASTKGPSVFPLAPSSKSTSGGTAALGCLVKDYFPEPVTVSWNSGALTSGVHTFPAVLQSSGLYSLSSVVTVPSSSLGTQTYICNVNHKPSNTKVDKRVEPKSCDKTHTCPPCPAPEAAGGPSVFLFPPKPKDTLMISRTPEVTCVVVDVSHEDPEVKFNWYVDGVEVHNAKTKPREEQYNSTYRVVSVLTVLHQDWLNGKEYKCAVSNKALPAPIEKTISKAKGQPREPQVYTLPPSRDELTKNQVSLSCAVKGFYPSDIAVEWESNGQPENNYKTTPPVLDSDGSFFLVSKLTVDKSRWQQGNVFSCSVMHEALHNHYTQKSLSLSPGGGGGSGGGGSDVVMTQSPSSVSASVGDRVTITCQASQNIRTYLSWYQQKPGKAPKLLIYAAANLASGVPSRFSGSGSGTDFTLTISDLEPGDAATYYCQSTYLGTDYVGGAFGGGTKLTVLGGGGSGGGGSGGGGSGGGGSEVQLVESGGGLVQPGGSLRLSCTASGFTISSYHMQWVRQAPGKGLEYIGTISSGGNVYYASSARGRFTISRPSSKNTVDLQMNSLRAEDTAVYYCARDSGYSDPMWGQGTLVTVSS

SEQ ID NO: 82 - DNA, 2898 bp, Artificial Sequence
  Synthesized
gatgtgcagatgacccagagcccgagcaccctgagcgcgaccgtgggccagcgcgtgaccattaactgccaggcgagcgaaagcattagcagctggctggcgtggtatcagcagaaaccgggccagccgccgaaactgctgatttatgaagcgagcaaactggcgagcggcgtgccgagccgctttagcggcagcggcagcggcaccgaatttaccctgaccattagcagcctgcagagcgatgattttgcgacctattattgccagggctatttttattttattagccgcacctatgtgaacagctttggcggcggcacccgcgtggaaattaaaggcggtggcggtagtgggggaggcggttctggcggcggagggtccggcggtggaggatcacagcagctgctggaaagcggcggccgcctgattaaaccgggcgcgaccctgcgcctgacctgcaaaaccagcggctttaccattagcaccaacgcgatgagctgggtgcgccagccgccgggcaaaggcctggaatggattggcgtgattaccggccgcgatattacctattatgcgagctgggcgaaaggccgctttaccattagcaaaaccagcattaacaccgtgtttctgcagatgcgcagcctgcgcgcggaagataccgcggtgtattattgcgcgcgcgatggcggcagcagcgcgattaccagcaacaacatttggggccgcggcaccctggtgaccgtgagcagcggcggtggagggtccggcggtggtggatcacaagtacagttgcagcaatccggtcccggtctcgtcaaaccgagtgagacgcttagtataacgtgtactgtttcaggctttagccttacgaactatggagttcactggattcggcaggcacccggcaaaggtttggaatggctgggtgttatttggtcaggtggaaatacagactataacaccccctttacaagtcggttcacaattacgaaagataattccaaaaatcaagtttatttcaagttgagatccgtccgcgcggacgacactgcgatctactattgtgcgagggcactgacctactacgattacgaatttgcgtattgggggcaagggactcttgtaacagtctccagtgctagcaccaagggcccatcggtcttccccctggcaccctcctccaagagcacctctgggggcacagcggccctgggctgcctggtcaaggactacttccccgaaccggtgacggtgtcgtggaactcaggcgccctgaccagcggcgtgcacaccttcccggctgtcctacagtcctcaggactctactccctcagcagcgtggtgaccgtgccctccagcagcttgggcacccagacctacatctgcaacgtgaatcacaagcccagcaacaccaaggtggacaagagagttgagcccaaatcttgtgacaaaactcacacatgcccaccgtgcccagcacctgaagccgcggggggaccgtcagtcttcctcttccccccaaaacccaaggacaccctcatgatctcccggacccctgaggtcacatgcgtggtggtggacgtgagccacgaagaccctgaggtcaagttcaactggtacgtggacggcgtggaggtgcataatgccaagacaaagccgcgggaggagcagtacaacagcacgtaccgtgtggtcagcgtcctcaccgtcctgcaccaggactggctgaatggcaaggagtacaagtgcgcggtctccaacaaagccctcccagcccccatcgagaaaaccatctccaaagccaaagggcagccccgagaaccacaggtgtataccctgcccccatcccgggatgagctgaccaagaaccaggtcagcctgtcctgcgccgtcaaaggcttctatcccagcgacatcgccgtggagtgggagagcaatgggcagccggagaacaactacaagaccacgcctcccgtgctggactccgacggctccttcttcctcgtgagcaagctcaccgtggacaagagcaggtggcagcaggggaacgtcttctcatgctccgtgatgcatgaggctctgcacaaccactacacgcagaagagcctctccctgtctccgggtggcggcggcggttcaggtggtgggggatccgacgttgtgatgacgcagtctcctagttcagtatcagcgtctgttggggatcgagtcacgattacatgccaggcgagccaaaatattaggacgtatctgtcttggtatcaacaaaagcctggtaaggctccaaaactcctcatttacgccgctgccaacttggctagtggagtaccttcacgctttagtgggtcaggttctggaacagattttacgttgacgatctccgatttggaaccaggggacgctgccacgtattattgccagtccacctacctcgggactgactacgttggtggggcgtttggcggaggaacaaaactcactgtacttggtggtggtggttcaggcggggggggttccggcggaggcggttctgggggtggaggttccgaggttcagttggttgaaagtggggggggactcgttcagcctggaggctctttgcgactttcttgtaccgcttctgggttcactataagttcatatcatatgcaatgggtaagacaggcgcctggtaagggacttgaatacataggaacaataagctctggtggtaacgtctattacgcctcatccgcgcgggggaggtttacaatttccaggccttctagcaaaaacacggtagatctgcaaatgaactctcttcgcgctgaagatacagcagtctactactgcgccagggattcagggtattctgaccccatgtgggggcagggcacattggttaccgtgtcctcttga

SEQ ID NO: 83 - protein, 960 aa, Artificial Sequence; identical to SEQ ID NO: 75
  Synthesized

SEQ ID NO: 84 - DNA, 2883 bp, Artificial Sequence; identical to SEQ ID NO: 76
  Synthesized

SEQ ID NO: 85 - protein, 965 aa, Artificial Sequence
  Synthesized
DVVMTQSPSSLSASVGDRVTISCQASESISSWLAWYQQKPGQAPKLLIYEASKLASGVPSRFSGSGSGTEFTLTISSLEPEDFATYYCQGYFYFISRTYVNSFGGGTKVEIKGGGGSGGGGSGGGGSGGGGSQQLVESGGGLVKPGGSLRLSCAASGFTISTNAMSWVRQAPGKGLEWVGVITGRDITYYASWAKGRFTISKTSKNTVYLQMNSLRAEDTAVYYCARDGGSSAITSNNIWGQGTLVTVSSGGGGSGGGGSQVQLQQSGPGLVKPSETLSITCTVSGFSLTNYGVHWIRQAPGKGLEWLGVIWSGGNTDYNTPFTSRFTITKDNSKNQVYFKLRSVRADDTAIYYCARALTYYDYEFAYWGQGTLVTVSSASTKGPSVFPLAPSSKSTSGGTAALGCLVKDYFPEPVTVSWNSGALTSGVHTFPAVLQSSGLYSLSSVVTVPSSSLGTQTYICNVNHKPSNTKVDKRVEPKSCDKTHTCPPCPAPEAAGGPSVFLFPPKPKDTLMISRTPEVTCVVVDVSHEDPEVKFNWYVDGVEVHNAKTKPREEQYNSTYRVVSVLTVLHQDWLNGKEYKCAVSNKALPAPIEKTISKAKGQPREPQVYTLPPSRDELTKNQVSLSCAVKGFYPSDIAVEWESNGQPENNYKTTPPVLDSDGSFFLVSKLTVDKSRWQQGNVFSCSVMHEALHNHYTQKSLSLSPGGGGGSGGGGSDVVMTQSPSSVSASVGDRVTITCQASQNIRTYLSWYQQKPGKAPKLLIYAAANLASGVPSRFSGSGSGTDFTLTISDLEPGDAATYYCQSTYLGTDYVGGAFGGGTKLTVLGGGGSGGGGSGGGGSGGGGSEVQLVESGGGLVQPGGSLRLSCTASGFTISSYHMQWVRQAPGKGLEYIGTISSGGNVYYASSARGRFTISRPSSKNTVDLQMNSLRAEDTAVYYCARDSGYSDPMWGQGTLVTVSS

SEQ ID NO: 86 - DNA, 2898 bp, Artificial Sequence
  Synthesized
gatgtggtgatgacccagagcccgagcagcctgagcgcgagcgtgggcgatcgcgtgaccattagctgccaggcgagcgaaagcattagcagctggctggcgtggtatcagcagaaaccgggccaggcgccgaaactgctgatttatgaagcgagcaaactggcgagcggcgtgccgagccgctttagcggcagcggcagcggcaccgaatttaccctgaccattagcagcctggaaccggaagattttgcgacctattattgccagggctatttttattttattagccgcacctatgtgaacagctttggcggcggcaccaaagtggaaattaaaggcggtggcggtagtgggggaggcggttctggcggcggagggtccggcggtggaggatcacagcagctggtggaaagcggcggcggcctggtgaaaccgggcggcagcctgcgcctgagctgcgcggcgagcggctttaccattagcaccaacgcgatgagctgggtgcgccaggcgccgggcaaaggcctggaatgggtgggcgtgattaccggccgcgatattacctattatgcgagctgggcgaaaggccgctttaccattagcaaaaccagcaaaaacaccgtgtatctgcagatgaacagcctgcgcgcggaagataccgcggtgtattattgcgcgcgcgatggcggcagcagcgcgattaccagcaacaacatttggggccagggcaccctggtgaccgtgagcagcggcggtggagggtccggcggtggtggatcacaagtacagttgcagcaatccggtcccggtctcgtcaaaccgagtgagacgcttagtataacgtgtactgtttcaggctttagccttacgaactatggagttcactggattcggcaggcacccggcaaaggtttggaatggctgggtgttatttggtcaggtggaaatacagactataacaccccctttacaagtcggttcacaattacgaaagataattccaaaaatcaagtttatttcaagttgagatccgtccgcgcggacgacactgcgatctactattgtgcgagggcactgacctactacgattacgaatttgcgtattgggggcaagggactcttgtaacagtctccagtgctagcaccaagggcccatcggtcttccccctggcaccctcctccaagagcacctctgggggcacagcggccctgggctgcctggtcaaggactacttccccgaaccggtgacggtgtcgtggaactcaggcgccctgaccagcggcgtgcacaccttcccggctgtcctacagtcctcaggactctactccctcagcagcgtggtgaccgtgccctccagcagcttgggcacccagacctacatctgcaacgtgaatcacaagcccagcaacaccaaggtggacaagagagttgagcccaaatcttgtgacaaaactcacacatgcccaccgtgcccagcacctgaagccgcggggggaccgtcagtcttcctcttccccccaaaacccaaggacaccctcatgatctcccggacccctgaggtcacatgcgtggtggtggacgtgagccacgaagaccctgaggtcaagttcaactggtacgtggacggcgtggaggtgcataatgccaagacaaagccgcgggaggagcagtacaacagcacgtaccgtgtggtcagcgtcctcaccgtcctgcaccaggactggctgaatggcaaggagtacaagtgcgcggtctccaacaaagccctcccagcccccatcgagaaaaccatctccaaagccaaagggcagccccgagaaccacaggtgtataccctgcccccatcccgggatgagctgaccaagaaccaggtcagcctgtcctgcgccgtcaaaggcttctatcccagcgacatcgccgtggagtgggagagcaatgggcagccggagaacaactacaagaccacgcctcccgtgctggactccgacggctccttcttcctcgtgagcaagctcaccgtggacaagagcaggtggcagcaggggaacgtcttctcatgctccgtgatgcatgaggctctgcacaaccactacacgcagaagagcctctccctgtctccgggtggcggcggcggttcaggtggtgggggatccgacgttgtgatgacgcagtctcctagttcagtatcagcgtctgttggggatcgagtcacgattacatgccaggcgagccaaaatattaggacgtatctgtcttggtatcaacaaaagcctggtaaggctccaaaactcctcatttacgccgctgccaacttggctagtggagtaccttcacgctttagtgggtcaggttctggaacagattttacgttgacgatctccgatttggaaccaggggacgctgccacgtattattgccagtccacctacctcgggactgactacgttggtggggcgtttggcggaggaacaaaactcactgtacttggtggtggtggttcaggcggggggggttccggcggaggcggttctgggggtggaggttccgaggttcagttggttgaaagtggggggggactcgttcagcctggaggctctttgcgactttcttgtaccgcttctgggttcactataagttcatatcatatgcaatgggtaagacaggcgcctggtaagggacttgaatacataggaacaataagctctggtggtaacgtctattacgcctcatccgcgcgggggaggtttacaatttccaggccttctagcaaaaacacggtagatctgcaaatgaactctcttcgcgctgaagatacagcagtctactactgcgccagggattcagggtattctgaccccatgtgggggcagggcacattggttaccgtgtcctcttga

SEQ ID NO: 87 - protein, 960 aa, Artificial Sequence; identical to SEQ ID NO: 75
  Synthesized

SEQ ID NO: 88 - DNA, 2883 bp, Artificial Sequence; identical to SEQ ID NO: 76
  Synthesized

SEQ ID NO: 89 - protein, 957 aa, Artificial Sequence
  Synthesized
DPVLTQSPSSLSASVGDRVTISCQSSQSVAKNNNLAWFQQKPGQAPKLLIYSASTLAAGVPSRFSGSGSGTDFTLTISSVQPEDFATYYCSARDSGNIQSFGGGTKVEIKGGGGSGGGGSGGGGSGGGGSQQLVESGGGLVKPGGSLRLSCAASGIDLSSNAIGWVRQAPGKGLEWVGVIFGSGNTYYASWAKGRFTISRSKNTVYLQMNSLRAEDTAVYYCARGGYSSDIWGQGTLVTVSSGGGGSGGGGSQVQLQQSGPGLVKPSETLSITCTVSGFSLTNYGVHWIRQAPGKGLEWLGVIWSGGNTDYNTPFTSRFTITKDNSKNQVYFKLRSVRADDTAIYYCARALTYYDYEFAYWGQGTLVTVSSASTKGPSVFPLAPSSKSTSGGTAALGCLVKDYFPEPVTVSWNSGALTSGVHTFPAVLQSSGLYSLSSVVTVPSSSLGTQTYICNVNHKPSNTKVDKRVEPKSCDKTHTCPPCPAPEAAGGPSVFLFPPKPKDTLMISRTPEVTCVVVDVSHEDPEVKFNWYVDGVEVHNAKTKPREEQYNSTYRVVSVLTVLHQDWLNGKEYKCAVSNKALPAPIEKTISKAKGQPREPQVYTLPPSRDELTKNQVSLSCAVKGFYPSDIAVEWESNGQPENNYKTTPPVLDSDGSFFLVSKLTVDKSRWQQGNVFSCSVMHEALHNHYTQKSLSLSPGGGGGSGGGGSDVVMTQSPSSVSASVGDRVTITCQASQNIRTYLSWYQQKPGKAPKLLIYAAANLASGVPSRFSGSGSGTDFTLTISDLEPGDAATYYCQSTYLGTDYVGGAFGGGTKLTVLGGGGSGGGGSGGGGSGGGGSEVQLVESGGGLVQPGGSLRLSCTASGFTISSYHMQWVRQAPGKGLEYIGTISSGGNVYYASSARGRFTISRPSSKNTVDLQMNSLRAEDTAVYYCARDSGYSDPMWGQGTLVTVSS

SEQ ID NO: 90 - DNA, 2874 bp, Artificial Sequence
  Synthesized
gatccagttctgacacaaagtccatccagcctgtctgcctcagtcggcgacagagtgaccatcagttgccagagctcacagtctgtggctaagaacaacaacttggcgtggttccaacagaaacctggacaggctccgaaattgctgatctattctgcttccacgcttgctgctggtgttccttcccgcttttcaggtagtggtagcgggacagacttcactttgactataagcagcgtgcagcctgaagattttgcgacctactattgttctgctagagacagtggaaatattcagtcctttggggggggaacgaaggtcgaaataaagggcggcggagggtctggtgggggtggcagtggtggtggaggaagtggtggcggtggttcccaacagttggttgagtctggtggcggtctcgttaagcctggagggtcccttcggcttagttgtgcggcctctgggatcgacctgtctagcaacgctataggatgggtacggcaagctccgggcaaaggccttgagtgggtcggcgttatttttgggagcggtaatacgtactacgccagctgggcaaaaggtaggttcactatcagtcgatcaaagaacacggtatatcttcagatgaacagtctccgggcggaggacaccgcggtttattattgcgcaagggggggatactcctcagacatatggggccaaggtactttggtgacggtctcgagcggcggtggagggtccggcggtggtggatcacaagtacagttgcagcaatccggtcccggtctcgtcaaaccgagtgagacgcttagtataacgtgtactgtttcaggctttagccttacgaactatggagttcactggattcggcaggcacccggcaaaggtttggaatggctgggtgttatttggtcaggtggaaatacagactataacaccccctttacaagtcggttcacaattacgaaagataattccaaaaatcaagtttatttcaagttgagatccgtccgcgcggacgacactgcgatctactattgtgcgagggcactgacctactacgattacgaatttgcgtattgggggcaagggactcttgtaacagtctccagtgctagcaccaagggcccatcggtcttccccctggcaccctcctccaagagcacctctgggggcacagcggccctgggctgcctggtcaaggactacttccccgaaccggtgacggtgtcgtggaactcaggcgccctgaccagcggcgtgcacaccttcccggctgtcctacagtcctcaggactctactccctcagcagcgtggtgaccgtgccctccagcagcttgggcacccagacctacatctgcaacgtgaatcacaagcccagcaacaccaaggtggacaagagagttgagcccaaatcttgtgacaaaactcacacatgcccaccgtgcccagcacctgaagccgcggggggaccgtcagtcttcctcttccccccaaaacccaaggacaccctcatgatctcccggacccctgaggtcacatgcgtggtggtggacgtgagccacgaagaccctgaggtcaagttcaactggtacgtggacggcgtggaggtgcataatgccaagacaaagccgcgggaggagcagtacaacagcacgtaccgtgtggtcagcgtcctcaccgtcctgcaccaggactggctgaatggcaaggagtacaagtgcgcggtctccaacaaagccctcccagcccccatcgagaaaaccatctccaaagccaaagggcagccccgagaaccacaggtgtataccctgcccccatcccgggatgagctgaccaagaaccaggtcagcctgtcctgcgccgtcaaaggcttctatcccagcgacatcgccgtggagtgggagagcaatgggcagccggagaacaactacaagaccacgcctcccgtgctggactccgacggctccttcttcctcgtgagcaagctcaccgtggacaagagcaggtggcagcaggggaacgtcttctcatgctccgtgatgcatgaggctctgcacaaccactacacgcagaagagcctctccctgtctccgggtggcggcggcggttcaggtggtgggggatccgacgttgtgatgacgcagtctcctagttcagtatcagcgtctgttggggatcgagtcacgattacatgccaggcgagccaaaatattaggacgtatctgtcttggtatcaacaaaagcctggtaaggctccaaaactcctcatttacgccgctgccaacttggctagtggagtaccttcacgctttagtgggtcaggttctggaacagattttacgttgacgatctccgatttggaaccaggggacgctgccacgtattattgccagtccacctacctcgggactgactacgttggtggggcgtttggcggaggaacaaaactcactgtacttggtggtggtggttcaggcggggggggttccggcggaggcggttctgggggtggaggttccgaggttcagttggttgaaagtggggggggactcgttcagcctggaggctctttgcgactttcttgtaccgcttctgggttcactataagttcatatcatatgcaatgggtaagacaggcgcctggtaagggacttgaatacataggaacaataagctctggtggtaacgtctattacgcctcatccgcgcgggggaggtttacaatttccaggccttctagcaaaaacacggtagatctgcaaatgaactctcttcgcgctgaagatacagcagtctactactgcgccagggattcagggtattctgaccccatgtgggggcagggcacattggttaccgtgtcctcttga

SEQ ID NO: 91 - protein, 960 aa, Artificial Sequence; identical to SEQ ID NO: 75
  Synthesized

SEQ ID NO: 92 - DNA, 2883 bp, Artificial Sequence; identical to SEQ ID NO: 76
  Synthesized

SEQ ID NO: 93 - protein, 840 aa, Artificial Sequence
  Synthesized
EVQLQESGGGLVQAGDSLSLSCLVSGRSFNSYTMGWFRQAPGKEREFVAAILWSGPTTYYADSVKGRFTISRDNAKNTVYLQMNSLKPEDTAVYYCAAALGVLVLAPGNVYSYWGQGTQVTVSSGGGGSGGGGSEVQLVESGGGLVQPGGSLRLSCAASGFTISTNAMSWVRQAPGKGLEWIGVITGRDITYYASWAKGRFTISRDNSKNTLYLQMNSLRAEDTAVYYCARDGGSSAITSNNIWGQGTLVTVSSASTKGPSVFPLAPSSKSTSGGTAALGCLVKDYFPEPVTVSWNSGALTSGVHTFPAVLQSSGLYSLSSVVTVPSSSLGTQTYICNVNHKPSNTKVDKRVEPKSCDKTHTCPPCPAPEAAGGPSVFLFPPKPKDTLMISRTPEVTCVVVDVSHEDPEVKFNWYVDGVEVHNAKTKPREEQYNSTYRVVSVLTVLHQDWLNGKEYKCAVSNKALPAPIEKTISKAKGQPREPQVYTLPPSRDELTKNQVSLSCAVKGFYPSDIAVEWESNGQPENNYKTTPPVLDSDGSFFLVSKLTVDKSRWQQGNVFSCSVMHEALHNHYTQKSLSLSPGGGGGSGGGGSDVVMTQSPSSVSASVGDRVTITCQASQNIRTYLSWYQQKPGKAPKLLIYAAANLASGVPSRFSGSGSGTDFTLTISDLEPGDAATYYCQSTYLGTDYVGGAFGGGTKLTVLGGGGSGGGGSGGGGSGGGGSEVQLVESGGGLVQPGGSLRLSCTASGFTISSYHMQWVRQAPGKGLEYIGTISSGGNVYYASSARGRFTISRPSSKNTVDLQMNSLRAEDTAVYYCARDSGYSDPMWGQGTLVTVSS

SEQ ID NO: 94 - DNA, 2523 bp, Artificial Sequence
  Synthesized
gaggtgcagctgcaggagtctggcggcggcctggtgcaggctggggacagcctgagcctgtcctgcctggtgtctggccgctccttcaactcctacaccatgggctggttccgccaggcccctgggaaggagcgggagtttgtggctgccatcctgtggagtggccccaccacctactatgctgactctgtgaagggccgcttcaccatctccagagacaatgccaagaacactgtgtacctgcagatgaacagcctgaagccagaggacacagctgtgtactactgtgctgctgccctgggagtgctggtgctggcccctggcaatgtgtacagctactggggccagggcacccaggtgactgtctcgagcggcggtggagggtccggcggtggtggatcagaggtgcagctggtggagtctgggggaggcttggtccagcctggggggtccctgagactctcctgtgcagcctctggattcaccatcagtaccaatgcaatgagctgggtccgccaggctccagggaaggggctggagtggatcggagtcattactggtcgtgatatcacatactacgcgagctgggcgaaaggcagattcaccatctccagagacaattccaagaacacgctgtatcttcaaatgaacagcctgagagccgaggacacggctgtgtattactgtgcgagagacggtggttcttctgctattactagtaacaacatttggggccagggaaccctggtcaccgtgtcctcagctagcaccaagggcccatcggtcttccccctggcaccctcctccaagagcacctctgggggcacagcggccctgggctgcctggtcaaggactacttccccgaaccggtgacggtgtcgtggaactcaggcgccctgaccagcggcgtgcacaccttcccggctgtcctacagtcctcaggactctactccctcagcagcgtggtgaccgtgccctccagcagcttgggcacccagacctacatctgcaacgtgaatcacaagcccagcaacaccaaggtggacaagagagttgagcccaaatcttgtgacaaaactcacacatgcccaccgtgcccagcacctgaagccgcggggggaccgtcagtcttcctcttccccccaaaacccaaggacaccctcatgatctcccggacccctgaggtcacatgcgtggtggtggacgtgagccacgaagaccctgaggtcaagttcaactggtacgtggacggcgtggaggtgcataatgccaagacaaagccgcgggaggagcagtacaacagcacgtaccgtgtggtcagcgtcctcaccgtcctgcaccaggactggctgaatggcaaggagtacaagtgcgcggtctccaacaaagccctcccagcccccatcgagaaaaccatctccaaagccaaagggcagccccgagaaccacaggtgtataccctgcccccatcccgggatgagctgaccaagaaccaggtcagcctgtcctgcgccgtcaaaggcttctatcccagcgacatcgccgtggagtgggagagcaatgggcagccggagaacaactacaagaccacgcctcccgtgctggactccgacggctccttcttcctcgtgagcaagctcaccgtggacaagagcaggtggcagcaggggaacgtcttctcatgctccgtgatgcatgaggctctgcacaaccactacacgcagaagagcctctccctgtctccgggtggcggcggcggttcaggtggtgggggatccgacgttgtgatgacgcagtctcctagttcagtatcagcgtctgttggggatcgagtcacgattacatgccaggcgagccaaaatattaggacgtatctgtcttggtatcaacaaaagcctggtaaggctccaaaactcctcatttacgccgctgccaacttggctagtggagtaccttcacgctttagtgggtcaggttctggaacagattttacgttgacgatctccgatttggaaccaggggacgctgccacgtattattgccagtccacctacctcgggactgactacgttggtggggcgtttggcggaggaacaaaactcactgtacttggtggtggtggttcaggcggggggggttccggcggaggcggttctgggggtggaggttccgaggttcagttggttgaaagtggggggggactcgttcagcctggaggctctttgcgactttcttgtaccgcttctgggttcactataagttcatatcatatgcaatgggtaagacaggcgcctggtaagggacttgaatacataggaacaataagctctggtggtaacgtctattacgcctcatccgcgcgggggaggtttacaatttccaggccttctagcaaaaacacggtagatctgcaaatgaactctcttcgcgctgaagatacagcagtctactactgcgccagggattcagggtattctgaccccatgtgggggcagggcacattggttaccgtgtcctcttga

SEQ ID NO: 95 - protein, 846 aa, Artificial Sequence
  Synthesized
QVQLVQSGGGLVQAGGSLSLSCAFSGRTFSMYTMGWFRQAPGKEREFVAANRGRGLSPDIADSVNGRFTISRDNAKNTLYLQMDSLKPEDTAVYYCAADLQYGSSWPQRSSAEYDYWGQGTTVTVSSGGGGSGGGGSDVVMTQSPSTLSASVGDRVTINCQASESISSWLAWYQQKPGKAPKLLIYEASKLASGVPSRFSGSGSGTEFTLTISSLQPDDFATYYCQGYFYFISRTYVNSFGGGTKVEIKRTVAAPSVFIFPPSDEQLKSGTASVVCLLNNFYPREAKVQWKVDNALQSGNSQESVTEQDSKDSTYSLSSTLTLSKADYEKHKVYACEVTHQGLSSPVTKSFNRGECGGDKTHTCPPCPAPEAAGGPSVFLFPPKPKDTLMISRTPEVTCVVVDVSHEDPEVKFNWYVDGVEVHNAKTKPREEQYNSTYRVVSVLTVLHQDWLNGKEYKCAVSNKALPAPIEKTISKAKGQPREPQVYTLPPSRDELTKNQVSLWCLVKGFYPSDIAVEWESNGQPENNYKTTPPVLDSDGSFFLYSKLTVDKSRWQQGNVFSCSVMHEALHNRFTQKSLSLSPGGGGGSGGGGSDIQMTQSPSTLSASVGDRVTITCQASQSISSHLNWYQQKPGKAPKLLIYKASTLASGVPSRFSGSGSGTEFTLTISSLQPDDFATYYCQQGYSWGNVDNVFGGGTKVTVLGGGGSGGGGSGGGGSGGGGSEVQLLESGGGLVQPGGSLSLSCAASGFSFSSGYDMCWVRQAPGKGLEWIACIAAGSAGITYDANWAKGRFTISRDNSKNTLYLQMNSLRAEDTAVYYCARSAFSFDYAMDLWGQGTLVTVSS

SEQ ID NO: 96 - DNA, 2541 bp, Artificial Sequence
  Synthesized
caggtgcagctggtgcagtctggcggaggcctggtgcaggctgggggcagcctgagcctgagctgtgccttctctggccgcaccttctccatgtacaccatgggctggttccgccaggccccagggaaggagagagagtttgtggctgccaacagaggcagaggcctgagcccagacattgctgactctgtgaatggccgcttcaccatctccagagacaatgccaagaacaccctgtacctgcagatggacagcctgaagccagaggacacagctgtgtactactgtgctgctgacctgcagtatggcagcagctggcctcagaggagctctgctgagtatgactactggggccagggcaccactgtgactgtctcgagcggcggtggagggtccggcggtggtggatcagacgtcgtgatgacccagtctccttccaccctgtctgcatctgtaggagacagagtcaccatcaattgccaagccagtgagagcattagcagttggttagcctggtatcagcagaaaccagggaaagcccctaagctcctgatctatgaagcatccaaactggcatctggggtcccatcaaggttcagcggcagtggatctgggacagaattcactctcaccatcagcagcctgcagcctgatgattttgcaacttattactgccaaggctatttttattttattagtcgtacttatgtaaattctttcggcggagggaccaaggtggagatcaaacgtacggtggctgcaccatctgtcttcatcttcccgccatctgatgagcagttgaaatctggaactgcctctgttgtgtgcctgctgaataacttctatcccagagaggccaaagtacagtggaaggtggataacgccctccaatcgggtaactcccaggagagtgtcacagagcaggacagcaaggacagcacctacagcctcagcagcaccctgacgctgagcaaagcagactacgagaaacacaaagtctacgcctgcgaagtcacccatcagggcctgagctcgcccgtcacaaagagcttcaacaggggagagtgtggaggcgacaaaactcacacatgcccaccgtgcccagcacctgaagccgcggggggaccgtcagtcttcctcttccccccaaaacccaaggacaccctcatgatctcccggacccctgaggtcacatgcgtggtggtggacgtgagccacgaagaccctgaggtcaagttcaactggtacgtggacggcgtggaggtgcataatgccaagacaaagccgcgggaggagcagtacaacagcacgtaccgtgtggtcagcgtcctcaccgtcctgcaccaggactggctgaatggcaaggagtacaagtgcgcggtctccaacaaagccctcccagcccccatcgagaaaaccatctccaaagccaaagggcagccccgagaaccacaggtgtacaccctgcccccaagccgggatgagctgaccaagaaccaggtcagcctgtggtgcctggtcaaaggcttctatcccagcgacatcgccgtggagtgggagagcaatgggcagccggagaacaactacaagaccacgcctcccgtgctggactccgacggctccttcttcctctatagcaagctcaccgtggacaagagcaggtggcagcaggggaacgtcttctcatgctccgtgatgcatgaggctctgcacaacagattcacgcagaagagcctctccctgtctccgggtggcggtggagggtccggcggtggtggatccgacattcagatgacacagtcaccgtctacgctctcagcctcagtaggcgatagggtgactatcacctgccaagcctcccaatctataagttcacacctcaactggtatcaacagaaacccggtaaagcaccgaagctgctcatctacaaggcatcaactcttgcctcaggtgtgcctagtcgcttctccgggagcggctccggtactgagtttactttgacgatatcttccctccaacccgacgacttcgccacatactattgtcagcagggttatagttggggaaatgttgacaatgtgtttggagggggaacgaaagtgactgtgttgggagggggaggaagtggcggcggcggaagcggaggtggtggctccggcgggggtggaagcgaagtgcaattgctcgaaagtggtggcggacttgtgcaacctggtggaagcctctcactctcttgcgcggcgagtggttttagcttcagtagcggctacgatatgtgctgggtaagacaggctcctggtaaaggccttgagtggattgcgtgtatcgccgccgggtctgctggtataacatacgatgcaaactgggcgaaagggcgcttcacaatctccagggacaactcaaaaaatacattgtacctccagatgaatagcctgagagccgaagacaccgcagtctactattgcgcaaggtcagcatttagcttcgattatgcaatggatctttggggccaggggacgctcgtcaccgtctcatcttga

SEQ ID NO: 97 - protein, 832 aa, Artificial Sequence
  Synthesized
EVQLQESGGGLVQAGDSLSLSCLVSGRSFNSYTMGWFRQAPGKEREFVAAILWSGPTTYYADSVKGRFTISRDNAKNTVYLQMNSLKPEDTAVYYCAAALGVLVLAPGNVYSYWGQGTQVTVSSGGGGSGGGGSQVQLQESGGRLVQPGEPLSLTCKTSGIDLSSNAIGWVRQAPGKGLEWIGVIFGSGNTYYASWAKGRFTISRSTSTVYLKMNSLRSEDTAIYYCARGGYSSDIWGQGTLVTVSSASTKGPSVFPLAPSSKSTSGGTAALGCLVKDYFPEPVTVSWNSGALTSGVHTFPAVLQSSGLYSLSSVVTVPSSSLGTQTYICNVNHKPSNTKVDKRVEPKSCDKTHTCPPCPAPEAAGGPSVFLFPPKPKDTLMISRTPEVTCVVVDVSHEDPEVKFNWYVDGVEVHNAKTKPREEQYNSTYRVVSVLTVLHQDWLNGKEYKCAVSNKALPAPIEKTISKAKGQPREPQVYTLPPSRDELTKNQVSLSCAVKGFYPSDIAVEWESNGQPENNYKTTPPVLDSDGSFFLVSKLTVDKSRWQQGNVFSCSVMHEALHNHYTQKSLSLSPGGGGGSGGGGSQVQLQQSGPGLVKPSETLSITCTVSGFSLTNYGVHWIRQAPGKGLEWLGVIWSGGNTDYNTPFTSRFTITKDNSKNQVYFKLRSVRADDTAIYYCARALTYYDYEFAYWGQGTLVTVSSGGGGSGGGGSGGGGSGGGGSEIVLTQSPSTLSVSPGERATFSCRASQSIGTNIHWYQQKPGKPPRLLIKYASESISGIPDRFSGSGSGTEFTLTISSVQSEDFAVYYCQQNNNWPTTFGPGTKLTVL

SEQ ID NO: 98 - DNA, 2499 bp, Artificial Sequence
  Synthesized
gaggtgcagctgcaggagtctggcggcggcctggtgcaggctggggacagcctgagcctgtcctgcctggtgtctggccgctccttcaactcctacaccatgggctggttccgccaggcccctgggaaggagcgggagtttgtggctgccatcctgtggagtggccccaccacctactatgctgactctgtgaagggccgcttcaccatctccagagacaatgccaagaacactgtgtacctgcagatgaacagcctgaagccagaggacacagctgtgtactactgtgctgctgccctgggagtgctggtgctggcccctggcaatgtgtacagctactggggccagggcacccaggtgactgtctcgagcggcggtggagggtccggcggtggtggatcacaagtgcagttgcaagaaagtggtggtagactggttcagcctggtgaacccttgtcactgacgtgtaaaacaagcggcattgatctgtcctctaacgccatcggatgggtccgacaggccccaggaaaaggtctggagtggatcggagttatcttcgggagcggcaatacatactacgcaagctgggcaaaagggcgatttacgatatcacggagcacctctacagtttatttgaaaatgaactccctccggtccgaggataccgcgatatattactgtgccagaggggggtactcctctgatatctgggggcagggtacactggttacagtttcatccgctagcaccaaaggcccctctgtgttccctctggccccctcctccaagagcacctctggaggcactgctgccctgggctgcctggtgaaggactacttcccagagcctgtgactgtgtcctggaactctggagccctgacctctggagtgcacaccttccctgctgtgctgcagagctctggcctctacagcctgtcctctgtggtcactgtgccctcctccagcctgggcacccagacctacatctgcaatgtgaaccacaagccctccaacaccaaggtggacaagagagtggagcccaagtcctgtgacaagacccacacctgccctccctgcccagccccagaggctgctggaggcccctctgtgttcctcttccctcccaagcccaaggacaccctgatgatctccaggaccccagaagtcacctgtgtggtggtggatgtgtcccatgaagacccagaagtgaagttcaactggtatgtggatggagtggaggtgcacaatgccaagaccaagcccagagaagagcagtacaactccacctaccgagtggtgtctgtgctgactgtgctgcaccaggactggctgaatgggaaggagtacaagtgtgctgtgtccaacaaggccctgcctgcccccattgagaagaccatctccaaggccaagggccagcccagagagccccaggtctacaccctgcctccctccagagatgagctgaccaagaaccaggtgtccctgtcctgtgctgtgaaaggcttctaccccagtgacattgctgtggagtgggagagcaatggccagccagagaacaactacaagaccacccctcctgtgctggactctgatggctccttcttcctggtctccaagctgactgtggacaagagccgctggcagcagggcaatgtgttctcctgctctgtcatgcatgaggccctgcacaaccactacacccagaagagcctgagcctgagccctggaggaggaggaggctctggaggaggaggatcccaagttcagttgcagcagtctggccctggcctggtcaagccttctgagacactgtccatcacctgtaccgtgtccggcttctccctgaccaattacggcgtgcactggatcagacaggcccctggcaaaggactggaatggctgggagtgatttggagcggcggcaacaccgactacaacacccctttcaccagccggttcaccatcaccaaggacaactccaagaaccaggtgtacttcaagctgcggagcgtgcgggctgatgacaccgccatctactactgtgctcgggccctgacctactacgactacgagtttgcttactggggccagggcaccctggtcacagtttcttctggtggtggtggttcaggcggggggggttccggcggaggcggttctgggggtggaggttccgagatcgtgctgacccagtctccttccacactgtctgtgtctcccggcgagagagccaccttcagctgtagagcctctcagtccatcggcaccaacatccactggtatcagcagaagcccggcaagcctcctcggctgctgattaagtacgcctccgagtccatcagcggcatccctgacagattctccggctctggctctggcaccgagtttaccctgaccatctcctccgtgcagtccgaggatttcgccgtgtactactgccagcagaacaacaactggcccaccacctttggacccggcaccaagctgaccgtgctgtga

SEQ ID NO: 99 - protein, 836 aa, Artificial Sequence
  Synthesized
QVQLVQSGGGLVQAGGSLSLSCAFSGRTFSMYTMGWFRQAPGKEREFVAANRGRGLSPDIADSVNGRFTISRDNAKNTLYLQMDSLKPEDTAVYYCAADLQYGSSWPQRSSAEYDYWGQGTTVTVSSGGGGSGGGGSDPQLTQSPSSLSATVGQRVTINCQSSQSVAKNNNLAWFQQKPGKPPKLLIYSASTLAAGVPSRFSGSGSGTQFTLTITRVQSEDFATYYCSARDSGNIQSFGGGTRVEIKRTVAAPSVFIFPPSDEQLKSGTASVVCLLNNFYPREAKVQWKVDNALQSGNSQESVTEQDSKDSTYSLSSTLTLSKADYEKHKVYACEVTHQGLSSPVTKSFNRGECGGDKTHTCPPCPAPEAAGGPSVFLFPPKPKDTLMISRTPEVTCVVVDVSHEDPEVKFNWYVDGVEVHNAKTKPREEQYNSTYRVVSVLTVLHQDWLNGKEYKCAVSNKALPAPIEKTISKAKGQPREPQVYTLPPSRDELTKNQVSLWCLVKGFYPSDIAVEWESNGQPENNYKTTPPVLDSDGSFFLYSKLTVDKSRWQQGNVFSCSVMHEALHNRFTQKSLSLSPGGGGGSGGGGSQVQLQESGGGLVKPGGSLSLSCAASGFTFSSYWMSWVRQAPGKGLEWVANINRDGSASYYVDSVKGRFTISRDDAKNSLYLQMNSLRAEDTAVYYCARDRGVGYFDLWGRGTLVTVSSGGGGSGGGGSGGGGSQSALTQPASVSGSPGQSITISCTGTSSDVGGYNFVSWYQQHPGKAPKLMIYDVSDRPSGVSDRFSGSKSGNTASLIISGLQADDEADYYCSSYGSSSTHVIFGGGTKVTVL

SEQ ID NO: 100 - DNA, 2511 bp, Artificial Sequence
  Synthesized
caggtgcagctggtgcagtctggcggaggcctggtgcaggctgggggcagcctgagcctgagctgtgccttctctggccgcaccttctccatgtacaccatgggctggttccgccaggccccagggaaggagagagagtttgtggctgccaacagaggcagaggcctgagcccagacattgctgactctgtgaatggccgcttcaccatctccagagacaatgccaagaacaccctgtacctgcagatggacagcctgaagccagaggacacagctgtgtactactgtgctgctgacctgcagtatggcagcagctggcctcagaggagctctgctgagtatgactactggggccagggcaccactgtgactgtctcgagtggcggtggagggtccggcggtggtggatcagatcctcaattgacccagtcccctagtagcctttctgcaaccgtgggccagagggtaacaatcaattgccagtcaagccagtccgtagcgaagaataataatttggcatggttccaacaaaaaccgggtaaacctcctaaactccttatctactcagcttcaacccttgccgcgggtgtgcccagccggttctcaggctcaggttccgggactcaatttacacttaccatcactcgcgtccaaagtgaggattttgcaacctactattgttctgcacgggattccgggaacatacagtcctttgggggtggaactcgggtggagataaaacgtacggtggctgccccctctgtgttcatcttcccacccagtgatgagcagctgaagagtggcacagcctctgtggtgtgcctgctcaacaacttctaccccagagaagccaaggtgcagtggaaggtggacaatgccctgcagagtggcaacagccaggagagtgtgacagagcaggacagcaaggacagcacctacagcctgtcctccaccctgaccctgtccaaggctgactatgagaagcacaaggtgtatgcctgtgaggtgacccaccagggcctgagcagccctgtgaccaagagcttcaaccgaggagagtgtggaggagacaagacccacacctgccctccctgcccagccccagaagctgctggaggcccctctgtgttcctcttccctcccaagcccaaggacaccctgatgatctccaggaccccagaagtcacctgtgtggtggtggatgtgtcccatgaagacccagaagtgaagttcaactggtatgtggatggagtggaagtgcacaatgccaagaccaagcccagagaagagcagtacaacagcacctaccgagtggtgtctgtgctgactgtgctgcaccaggactggctgaatgggaaggagtacaagtgtgctgtgtccaacaaggccctgcctgcccccattgagaagaccatctccaaggccaagggccagcccagagagccccaggtctacaccctgcctccctccagagatgagctgaccaagaaccaggtgtccctgtggtgcctggtgaaaggcttctaccccagtgacattgctgtggagtgggagagcaatggccagccagagaacaactacaagaccacccctcctgtgctggactctgatggctccttcttcctgtacagcaagctgactgtggacaagagccgctggcagcagggcaatgtgttctcctgctctgtcatgcatgaggccctgcacaaccgcttcacccagaagagcctgagcctgagccctggaggaggaggaggctctggaggaggaggatcccaggtgcagctgcaggagtcggggggaggcctggtcaagcctggagggtccctgagcctctcctgtgcagcctctggattcacctttagtagttattggatgagctgggtccgccaggctccagggaaggggctggagtgggtggccaacataaaccgcgatggaagtgcgagttactatgtggactctgtgaagggccgattcaccatctccagagacgacgccaagaactcactgtatctgcaaatgaacagcctgagagctgaggacacggctgtgtattactgtgcgagagatcgtggggtgggctacttcgatctctggggccgtggcaccctggtcaccgtgtctagcggtggaggcggttcaggcggaggtggttccggcggtggcggctcccagtctgccctgactcagcctgcctccgtgtctgggtctcctggacagtcgatcaccatctcctgcactggaaccagcagtgacgttggtggttataactttgtctcctggtaccaacaacacccaggcaaagcccccaaactcatgatctatgatgtcagtgatcggccctcaggggtgtctgatcgcttctccggctccaagtctggcaacacggcctccctgatcatctctggcctccaggctgacgacgaggctgattattactgcagctcatatgggagcagcagcactcatgtgattttcggcggagggaccaaggtgaccgtcctataa

SEQ ID NO: 101 - protein, 583 aa, Artificial Sequence
  Synthesized
EVQLQESGGGLVQAGDSLSLSCLVSGRSFNSYTMGWFRQAPGKEREFVAAILWSGPTTYYADSVKGRFTISRDNAKNTVYLQMNSLKPEDTAVYYCAAALGVLVLAPGNVYSYWGQGTQVTVSSGGGGSGGGGSEVQLVESGGGLVQPGGSLRLSCAASGFTISTNAMSWVRQAPGKGLEWIGVITGRDITYYASWAKGRFTISRDNSKNTLYLQMSSLRSEDTAVYYCARDGGSSAITSNNIWGQGTLVTVSSASTKGPSVFPLAPSSKSTSGGTAALGCLVKDYFPEPVTVSWNSGALTSGVHTFPAVLQSSGLYSLSSVVTVPSSSLGTQTYICNVNHKPSNTKVDKRVEPKSCDKTHTCPPCPAPEAAGGPSVFLFPPKPKDTLMISRTPEVTCVVVDVSHEDPEVKFNWYVDGVEVHNAKTKPREEQYNSTYRVVSVLTVLHQDWLNGKEYKCAVSNKALPAPIEKTISKAKGQPREPQVYTLPPSRDELTKNQVSLSCAVKGFYPSDIAVEWESNGQPENNYKTTPPVLDSDGSFFLVSKLTVDKSRWQQGNVFSCSVMHEALHNHYTQKSLSLSPG

SEQ ID NO: 102 - DNA, 1752 bp, Artificial Sequence
  Synthesized
gaggtgcagctgcaggagtctggcggcggcctggtgcaggctggggacagcctgagcctgtcctgcctggtgtctggccgctccttcaactcctacaccatgggctggttccgccaggcccctgggaaggagcgggagtttgtggctgccatcctgtggagtggccccaccacctactatgctgactctgtgaagggccgcttcaccatctccagagacaatgccaagaacactgtgtacctgcagatgaacagcctgaagccagaggacacagctgtgtactactgtgctgctgccctgggagtgctggtgctggcccctggcaatgtgtacagctactggggccagggcacccaggtgactgtctcgagcggaggaggaggctctggaggaggaggcagtgaggtgcagctggtggagagtggaggaggcctggtgcagcctggaggcagcctgcggctgtcctgtgctgcctctggcttcaccatctccaccaatgccatgtcctgggtgcgccaggcccctggcaagggcctggagtggattggagtcatcactggcagagacatcacctactatgcctcctgggccaaaggccgcttcaccatctccagagacaacagcaagaacaccctgtacctgcagatgagcagcctgcgcagtgaggacacagctgtgtactactgtgcccgagatggaggcagcagtgccatcacctccaacaacatctggggccagggcaccctggtcactgtgtcctctgctagcaccaaaggcccctctgtgttccctctggccccctcctccaagagcacctctggaggcactgctgccctgggctgcctggtgaaggactacttcccagagcctgtgactgtgtcctggaactctggagccctgacctctggagtgcacaccttccctgctgtgctgcagagctctggcctctacagcctgtcctctgtggtcactgtgccctcctccagcctgggcacccagacctacatctgcaatgtgaaccacaagccctccaacaccaaggtggacaagagagtggagcccaagtcctgtgacaagacccacacctgccctccctgcccagccccagaggctgctggaggcccctctgtgttcctcttccctcccaagcccaaggacaccctgatgatctccaggaccccagaagtcacctgtgtggtggtggatgtgtcccatgaagacccagaagtgaagttcaactggtatgtggatggagtggaggtgcacaatgccaagaccaagcccagagaagagcagtacaactccacctaccgagtggtgtctgtgctgactgtgctgcaccaggactggctgaatgggaaggagtacaagtgtgctgtgtccaacaaggccctgcctgcccccattgagaagaccatctccaaggccaagggccagcccagagagccccaggtctacaccctgcctccctccagagatgagctgaccaagaaccaggtgtccctgtcctgtgctgtgaaaggcttctaccccagtgacattgctgtggagtgggagagcaatggccagccagagaacaactacaagaccacccctcctgtgctggactctgatggctccttcttcctggtctccaagctgactgtggacaagagccgctggcagcagggcaatgtgttctcctgctctgtcatgcatgaggccctgcacaaccactacacccagaagagcctgagcctgagccctggatga

SEQ ID NO: 103 - protein, 584 aa, Artificial Sequence
  Synthesized
QVQLVQSGGGLVQAGGSLSLSCAFSGRTFSMYTMGWFRQAPGKEREFVAANRGRGLSPDIADSVNGRFTISRDNAKNTLYLQMDSLKPEDTAVYYCAADLQYGSSWPQRSSAEYDYWGQGTTVTVSSGGGGSGGGGSDVVMTQSPSTLSASVGDRVTINCQASESISSWLAWYQQKPGKAPKLLIYEASKLASGVPSRFSGSGSGTEFTLTISSLQPDDFATYYCQGYFYFISRTYVNSFGGGTKVEIKRTVAAPSVFIFPPSDEQLKSGTASVVCLLNNFYPREAKVQWKVDNALQSGNSQESVTEQDSKDSTYSLSSTLTLSKADYEKHKVYACEVTHQGLSSPVTKSFNRGECGGDKTHTCPPCPAPEAAGGPSVFLFPPKPKDTLMISRTPEVTCVVVDVSHEDPEVKFNWYVDGVEVHNAKTKPREEQYNSTYRVVSVLTVLHQDWLNGKEYKCAVSNKALPAPIEKTISKAKGQPREPQVYTLPPSRDELTKNQVSLWCLVKGFYPSDIAVEWESNGQPENNYKTTPPVLDSDGSFFLYSKLTVDKSRWQQGNVFSCSVMHEALHNRFTQKSLSLSPG

SEQ ID NO: 104 - DNA, 1755 bp, Artificial Sequence
  Synthesized
caggtgcagctggtgcagtctggcggaggcctggtgcaggctgggggcagcctgagcctgagctgtgccttctctggccgcaccttctccatgtacaccatgggctggttccgccaggccccagggaaggagagagagtttgtggctgccaacagaggcagaggcctgagcccagacattgctgactctgtgaatggccgcttcaccatctccagagacaatgccaagaacaccctgtacctgcagatggacagcctgaagccagaggacacagctgtgtactactgtgctgctgacctgcagtatggcagcagctggcctcagaggagctctgctgagtatgactactggggccagggcaccactgtgactgtctcgagcggaggaggaggctctggaggaggaggcagtgatgtggtgatgacccagagcccctccaccctgtctgcctctgtgggagacagagtgaccatcaactgccaggccagtgagagcatctcctcctggctggcctggtaccagcagaagccaggcaaggcccccaagctgctcatctatgaagcctccaagctggcctctggagtgccctcccgcttctctggctctggctctggcacagagttcaccctgaccatctccagcctgcagccagatgactttgccacctactactgccagggctacttctacttcatctccaggacctatgtgaacagctttggaggaggcaccaaggtggagatcaagcgtacggtggctgccccctctgtgttcatcttcccacccagtgatgagcagctgaagagtggcacagcctctgtggtgtgcctgctcaacaacttctaccccagagaagccaaggtgcagtggaaggtggacaatgccctgcagagtggcaacagccaggagagtgtgacagagcaggacagcaaggacagcacctacagcctgtcctccaccctgaccctgtccaaggctgactatgagaagcacaaggtgtatgcctgtgaggtgacccaccagggcctgagcagccctgtgaccaagagcttcaaccgaggagagtgtggaggagacaagacccacacctgccctccctgcccagccccagaagctgctggaggcccctctgtgttcctcttccctcccaagcccaaggacaccctgatgatctccaggaccccagaagtcacctgtgtggtggtggatgtgtcccatgaagacccagaagtgaagttcaactggtatgtggatggagtggaagtgcacaatgccaagaccaagcccagagaagagcagtacaacagcacctaccgagtggtgtctgtgctgactgtgctgcaccaggactggctgaatgggaaggagtacaagtgtgctgtgtccaacaaggccctgcctgcccccattgagaagaccatctccaaggccaagggccagcccagagagccccaggtctacaccctgcctccctccagagatgagctgaccaagaaccaggtgtccctgtggtgcctggtgaaaggcttctaccccagtgacattgctgtggagtgggagagcaatggccagccagagaacaactacaagaccacccctcctgtgctggactctgatggctccttcttcctgtacagcaagctgactgtggacaagagccgctggcagcagggcaatgtgttctcctgctctgtcatgcatgaggccctgcacaaccgcttcacccagaagagcctgagcctgagccctggatga

SEQ ID NO: 105 - protein, 576 aa, Artificial Sequence
  Synthesized
EVQLQESGGGLVQAGDSLSLSCLVSGRSFNSYTMGWFRQAPGKEREFVAAILWSGPTTYYADSVKGRFTISRDNAKNTVYLQMNSLKPEDTAVYYCAAALGVLVLAPGNVYSYWGQGTQVTVSSGGGGSGGGGSQVQLQESGGRLVQPGEPLSLTCKTSGIDLSSNAIGWVRQAPGKGLEWIGVIFGSGNTYYASWAKGRFTISRSTSTVYLKMNSLRSEDTAIYYCARGGYSSDIWGQGTLVTVSSASTKGPSVFPLAPSSKSTSGGTAALGCLVKDYFPEPVTVSWNSGALTSGVHTFPAVLQSSGLYSLSSVVTVPSSSLGTQTYICNVNHKPSNTKVDKRVEPKSCDKTHTCPPCPAPEAAGGPSVFLFPPKPKDTLMISRTPEVTCVVVDVSHEDPEVKFNWYVDGVEVHNAKTKPREEQYNSTYRVVSVLTVLHQDWLNGKEYKCAVSNKALPAPIEKTISKAKGQPREPQVYTLPPSRDELTKNQVSLSCAVKGFYPSDIAVEWESNGQPENNYKTTPPVLDSDGSFFLVSKLTVDKSRWQQGNVFSCSVMHEALHNHYTQKSLSLSPG

SEQ ID NO: 106 - DNA, 1731 bp, Artificial Sequence
  Synthesized
gaggtgcagctgcaggagtctggcggcggcctggtgcaggctggggacagcctgagcctgtcctgcctggtgtctggccgctccttcaactcctacaccatgggctggttccgccaggcccctgggaaggagcgggagtttgtggctgccatcctgtggagtggccccaccacctactatgctgactctgtgaagggccgcttcaccatctccagagacaatgccaagaacactgtgtacctgcagatgaacagcctgaagccagaggacacagctgtgtactactgtgctgctgccctgggagtgctggtgctggcccctggcaatgtgtacagctactggggccagggcacccaggtgactgtctcgagcggcggtggagggtccggcggtggtggatcacaagtgcagttgcaagaaagtggtggtagactggttcagcctggtgaacccttgtcactgacgtgtaaaacaagcggcattgatctgtcctctaacgccatcggatgggtccgacaggccccaggaaaaggtctggagtggatcggagttatcttcgggagcggcaatacatactacgcaagctgggcaaaagggcgatttacgatatcacggagcacctctacagtttatttgaaaatgaactccctccggtccgaggataccgcgatatattactgtgccagaggggggtactcctctgatatctgggggcagggtacactggttacagtttcatccgctagcaccaaaggcccctctgtgttccctctggccccctcctccaagagcacctctggaggcactgctgccctgggctgcctggtgaaggactacttcccagagcctgtgactgtgtcctggaactctggagccctgacctctggagtgcacaccttccctgctgtgctgcagagctctggcctctacagcctgtcctctgtggtcactgtgccctcctccagcctgggcacccagacctacatctgcaatgtgaaccacaagccctccaacaccaaggtggacaagagagtggagcccaagtcctgtgacaagacccacacctgccctccctgcccagccccagaggctgctggaggcccctctgtgttcctcttccctcccaagcccaaggacaccctgatgatctccaggaccccagaagtcacctgtgtggtggtggatgtgtcccatgaagacccagaagtgaagttcaactggtatgtggatggagtggaggtgcacaatgccaagaccaagcccagagaagagcagtacaactccacctaccgagtggtgtctgtgctgactgtgctgcaccaggactggctgaatgggaaggagtacaagtgtgctgtgtccaacaaggccctgcctgcccccattgagaagaccatctccaaggccaagggccagcccagagagccccaggtctacaccctgcctccctccagagatgagctgaccaagaaccaggtgtccctgtcctgtgctgtgaaaggcttctaccccagtgacattgctgtggagtgggagagcaatggccagccagagaacaactacaagaccacccctcctgtgctggactctgatggctccttcttcctggtctccaagctgactgtggacaagagccgctggcagcagggcaatgtgttctcctgctctgtcatgcatgaggccctgcacaaccactacacccagaagagcctgagcctgagccctggatga

SEQ ID NO: 107 - protein, 582 aa, Artificial Sequence
  Synthesized
QVQLVQSGGGLVQAGGSLSLSCAFSGRTFSMYTMGWFRQAPGKEREFVAANRGRGLSPDIADSVNGRFTISRDNAKNTLYLQMDSLKPEDTAVYYCAADLQYGSSWPQRSSAEYDYWGQGTTVTVSSGGGGSGGGGSDPQLTQSPSSLSATVGQRVTINCQSSQSVAKNNNLAWFQQKPGKPPKLLIYSASTLAAGVPSRFSGSGSGTQFTLTITRVQSEDFATYYCSARDSGNIQSFGGGTRVEIKRTVAAPSVFIFPPSDEQLKSGTASVVCLLNNFYPREAKVQWKVDNALQSGNSQESVTEQDSKDSTYSLSSTLTLSKADYEKHKVYACEVTHQGLSSPVTKSFNRGECGGDKTHTCPPCPAPEAAGGPSVFLFPPKPKDTLMISRTPEVTCVVVDVSHEDPEVKFNWYVDGVEVHNAKTKPREEQYNSTYRVVSVLTVLHQDWLNGKEYKCAVSNKALPAPIEKTISKAKGQPREPQVYTLPPSRDELTKNQVSLWCLVKGFYPSDIAVEWESNGQPENNYKTTPPVLDSDGSFFLYSKLTVDKSRWQQGNVFSCSVMHEALHNRFTQKSLSLSPG

SEQ ID NO: 108 - DNA, 1749 bp, Artificial Sequence
  Synthesized
caggtgcagctggtgcagtctggcggaggcctggtgcaggctgggggcagcctgagcctgagctgtgccttctctggccgcaccttctccatgtacaccatgggctggttccgccaggccccagggaaggagagagagtttgtggctgccaacagaggcagaggcctgagcccagacattgctgactctgtgaatggccgcttcaccatctccagagacaatgccaagaacaccctgtacctgcagatggacagcctgaagccagaggacacagctgtgtactactgtgctgctgacctgcagtatggcagcagctggcctcagaggagctctgctgagtatgactactggggccagggcaccactgtgactgtctcgagtggcggtggagggtccggcggtggtggatcagatcctcaattgacccagtcccctagtagcctttctgcaaccgtgggccagagggtaacaatcaattgccagtcaagccagtccgtagcgaagaataataatttggcatggttccaacaaaaaccgggtaaacctcctaaactccttatctactcagcttcaacccttgccgcgggtgtgcccagccggttctcaggctcaggttccgggactcaatttacacttaccatcactcgcgtccaaagtgaggattttgcaacctactattgttctgcacgggattccgggaacatacagtcctttgggggtggaactcgggtggagataaaacgtacggtggctgccccctctgtgttcatcttcccacccagtgatgagcagctgaagagtggcacagcctctgtggtgtgcctgctcaacaacttctaccccagagaagccaaggtgcagtggaaggtggacaatgccctgcagagtggcaacagccaggagagtgtgacagagcaggacagcaaggacagcacctacagcctgtcctccaccctgaccctgtccaaggctgactatgagaagcacaaggtgtatgcctgtgaggtgacccaccagggcctgagcagccctgtgaccaagagcttcaaccgaggagagtgtggaggagacaagacccacacctgccctccctgcccagccccagaagctgctggaggcccctctgtgttcctcttccctcccaagcccaaggacaccctgatgatctccaggaccccagaagtcacctgtgtggtggtggatgtgtcccatgaagacccagaagtgaagttcaactggtatgtggatggagtggaagtgcacaatgccaagaccaagcccagagaagagcagtacaacagcacctaccgagtggtgtctgtgctgactgtgctgcaccaggactggctgaatgggaaggagtacaagtgtgctgtgtccaacaaggccctgcctgcccccattgagaagaccatctccaaggccaagggccagcccagagagccccaggtctacaccctgcctccctccagagatgagctgaccaagaaccaggtgtccctgtggtgcctggtgaaaggcttctaccccagtgacattgctgtggagtgggagagcaatggccagccagagaacaactacaagaccacccctcctgtgctggactctgatggctccttcttcctgtacagcaagctgactgtggacaagagccgctggcagcagggcaatgtgttctcctgctctgtcatgcatgaggccctgcacaaccgcttcacccagaagagcctgagcctgagccctggatga

SEQ ID NO: 109 - protein, 576 aa, Artificial Sequence
  Synthesized
QVQLQESGGRLVQPGEPLSLTCKTSGIDLSSNAIGWVRQAPGKGLEWIGVIFGSGNTYYASWAKGRFTISRSTSTVYLKMNSLRSEDTAIYYCARGGYSSDIWGQGTLVTVSSASTKGPSVFPLAPSSKSTSGGTAALGCLVKDYFPEPVTVSWNSGALTSGVHTFPAVLQSSGLYSLSSVVTVPSSSLGTQTYICNVNHKPSNTKVDKRVEPKSCDKTHTCPPCPAPEAAGGPSVFLFPPKPKDTLMISRTPEVTCVVVDVSHEDPEVKFNWYVDGVEVHNAKTKPREEQYNSTYRVVSVLTVLHQDWLNGKEYKCAVSNKALPAPIEKTISKAKGQPREPQVYTLPPSRDELTKNQVSLSCAVKGFYPSDIAVEWESNGQPENNYKTTPPVLDSDGSFFLVSKLTVDKSRWQQGNVFSCSVMHEALHNHYTQKSLSLSPGGGGGSGGGGSEVQLQESGGGLVQAGDSLSLSCLVSGRSFNSYTMGWFRQAPGKEREFVAAILWSGPTTYYADSVKGRFTISRDNAKNTVYLQMNSLKPEDTAVYYCAAALGVLVLAPGNVYSYWGQGTQVTVSS

SEQ ID NO: 110 - DNA, 1731 bp, Artificial Sequence
  Synthesized
caagtgcagttgcaagaaagtggtggtagactggttcagcctggtgaacccttgtcactgacgtgtaaaacaagcggcattgatctgtcctctaacgccatcggatgggtccgacaggccccaggaaaaggtctggagtggatcggagttatcttcgggagcggcaatacatactacgcaagctgggcaaaagggcgatttacgatatcacggagcacctctacagtttatttgaaaatgaactccctccggtccgaggataccgcgatatattactgtgccagaggggggtactcctctgatatctgggggcagggtacactggttacagtttcatccgctagcaccaaaggcccctctgtgttccctctggccccctcctccaagagcacctctggaggcactgctgccctgggctgcctggtgaaggactacttcccagagcctgtgactgtgtcctggaactctggagccctgacctctggagtgcacaccttccctgctgtgctgcagagctctggcctctacagcctgtcctctgtggtcactgtgccctcctccagcctgggcacccagacctacatctgcaatgtgaaccacaagccctccaacaccaaggtggacaagagagtggagcccaagtcctgtgacaagacccacacctgccctccctgcccagccccagaggctgctggaggcccctctgtgttcctcttccctcccaagcccaaggacaccctgatgatctccaggaccccagaagtcacctgtgtggtggtggatgtgtcccatgaagacccagaagtgaagttcaactggtatgtggatggagtggaggtgcacaatgccaagaccaagcccagagaagagcagtacaactccacctaccgagtggtgtctgtgctgactgtgctgcaccaggactggctgaatgggaaggagtacaagtgtgctgtgtccaacaaggccctgcctgcccccattgagaagaccatctccaaggccaagggccagcccagagagccccaggtctacaccctgcctccctccagagatgagctgaccaagaaccaggtgtccctgtcctgtgctgtgaaaggcttctaccccagtgacattgctgtggagtgggagagcaatggccagccagagaacaactacaagaccacccctcctgtgctggactctgatggctccttcttcctggtctccaagctgactgtggacaagagccgctggcagcagggcaatgtgttctcctgctctgtcatgcatgaggccctgcacaaccactacacccagaagagcctgagcctgagccctggaggaggaggaggctctggaggaggaggatccgaggtgcagctgcaggagtctggcggcggcctggtgcaggctggggacagcctgagcctgtcctgcctggtgtctggccgctccttcaactcctacaccatgggctggttccgccaggcccctgggaaggagcgggagtttgtggctgccatcctgtggagtggccccaccacctactatgctgactctgtgaagggccgcttcaccatctccagagacaatgccaagaacactgtgtacctgcagatgaacagcctgaagccagaggacacagctgtgtactactgtgctgctgccctgggagtgctggtgctggcccctggcaatgtgtacagctactggggccagggcacccaggtgactgtgtctagctga

SEQ ID NO: 111 - protein, 582 aa, Artificial Sequence
  Synthesized
DPQLTQSPSSLSATVGQRVTINCQSSQSVAKNNNLAWFQQKPGKPPKLLIYSASTLAAGVPSRFSGSGSGTQFTLTITRVQSEDFATYYCSARDSGNIQSFGGGTRVEIKRTVAAPSVFIFPPSDEQLKSGTASVVCLLNNFYPREAKVQWKVDNALQSGNSQESVTEQDSKDSTYSLSSTLTLSKADYEKHKVYACEVTHQGLSSPVTKSFNRGECGGDKTHTCPPCPAPEAAGGPSVFLFPPKPKDTLMISRTPEVTCVVVDVSHEDPEVKFNWYVDGVEVHNAKTKPREEQYNSTYRVVSVLTVLHQDWLNGKEYKCAVSNKALPAPIEKTISKAKGQPREPQVYTLPPSRDELTKNQVSLWCLVKGFYPSDIAVEWESNGQPENNYKTTPPVLDSDGSFFLYSKLTVDKSRWQQGNVFSCSVMHEALHNRFTQKSLSLSPGGGGGSGGGGSQVQLVQSGGGLVQAGGSLSLSCAFSGRTFSMYTMGWFRQAPGKEREFVAANRGRGLSPDIADSVNGRFTISRDNAKNTLYLQMDSLKPEDTAVYYCAADLQYGSSWPQRSSAEYDYWGQGTTVTVSS

SEQ ID NO: 112 - DNA, 1749 bp, Artificial Sequence
  Synthesized
gatcctcaattgacccagtcccctagtagcctttctgcaaccgtgggccagagggtaacaatcaattgccagtcaagccagtccgtagcgaagaataataatttggcatggttccaacaaaaaccgggtaaacctcctaaactccttatctactcagcttcaacccttgccgcgggtgtgcccagccggttctcaggctcaggttccgggactcaatttacacttaccatcactcgcgtccaaagtgaggattttgcaacctactattgttctgcacgggattccgggaacatacagtcctttgggggtggaactcgggtggagataaaacgtacggtggctgccccctctgtgttcatcttcccacccagtgatgagcagctgaagagtggcacagcctctgtggtgtgcctgctcaacaacttctaccccagagaagccaaggtgcagtggaaggtggacaatgccctgcagagtggcaacagccaggagagtgtgacagagcaggacagcaaggacagcacctacagcctgtcctccaccctgaccctgtccaaggctgactatgagaagcacaaggtgtatgcctgtgaggtgacccaccagggcctgagcagccctgtgaccaagagcttcaaccgaggagagtgtggaggagacaagacccacacctgccctccctgcccagccccagaagctgctggaggcccctctgtgttcctcttccctcccaagcccaaggacaccctgatgatctccaggaccccagaagtcacctgtgtggtggtggatgtgtcccatgaagacccagaagtgaagttcaactggtatgtggatggagtggaagtgcacaatgccaagaccaagcccagagaagagcagtacaacagcacctaccgagtggtgtctgtgctgactgtgctgcaccaggactggctgaatgggaaggagtacaagtgtgctgtgtccaacaaggccctgcctgcccccattgagaagaccatctccaaggccaagggccagcccagagagccccaggtctacaccctgcctccctccagagatgagctgaccaagaaccaggtgtccctgtggtgcctggtgaaaggcttctaccccagtgacattgctgtggagtgggagagcaatggccagccagagaacaactacaagaccacccctcctgtgctggactctgatggctccttcttcctgtacagcaagctgactgtggacaagagccgctggcagcagggcaatgtgttctcctgctctgtcatgcatgaggccctgcacaaccgcttcacccagaagagcctgagcctgagccctggaggaggaggaggctctggaggaggaggatcccaggtgcagctggtgcagtctggcggaggcctggtgcaggctgggggcagcctgagcctgagctgtgccttctctggccgcaccttctccatgtacaccatgggctggttccgccaggccccagggaaggagagagagtttgtggctgccaacagaggcagaggcctgagcccagacattgctgactctgtgaatggccgcttcaccatctccagagacaatgccaagaacaccctgtacctgcagatggacagcctgaagccagaggacacagctgtgtactactgtgctgctgacctgcagtatggcagcagctggcctcagaggagctctgctgagtatgactactggggccagggcaccactgtgactgtgtctagctga

SEQ ID NO: 113 - protein, 442 aa, Artificial Sequence; identical to SEQ ID NO: 1
  Synthesized

SEQ ID NO: 114 - DNA, 1329 bp, Artificial Sequence
  Synthesized
caagtgcagttgcaagaaagtggtggtagactggttcagcctggtgaacccttgtcactgacgtgtaaaacaagcggcattgatctgtcctctaacgccatcggatgggtccgacaggccccaggaaaaggtctggagtggatcggagttatcttcgggagcggcaatacatactacgcaagctgggcaaaagggcgatttacgatatcacggagcacctctacagtttatttgaaaatgaactccctccggtccgaggataccgcgatatattactgtgccagaggggggtactcctctgatatctgggggcagggtacactggttacagtttcatccgctagcaccaaaggcccctctgtgttccctctggccccctcctccaagagcacctctggaggcactgctgccctgggctgcctggtgaaggactacttcccagagcctgtgactgtgtcctggaactctggagccctgacctctggagtgcacaccttccctgctgtgctgcagagctctggcctctacagcctgtcctctgtggtcactgtgccctcctccagcctgggcacccagacctacatctgcaatgtgaaccacaagccctccaacaccaaggtggacaagagagtggagcccaagtcctgtgacaagacccacacctgccctccctgcccagccccagaggctgctggaggcccctctgtgttcctcttccctcccaagcccaaggacaccctgatgatctccaggaccccagaagtcacctgtgtggtggtggatgtgtcccatgaagacccagaagtgaagttcaactggtatgtggatggagtggaggtgcacaatgccaagaccaagcccagagaagagcagtacaactccacctaccgagtggtgtctgtgctgactgtgctgcaccaggactggctgaatgggaaggagtacaagtgtgctgtgtccaacaaggccctgcctgcccccattgagaagaccatctccaaggccaagggccagcccagagagccccaggtctacaccctgcctccctccagagatgagctgaccaagaaccaggtgtccctgtcctgtgctgtgaaaggcttctaccccagtgacattgctgtggagtgggagagcaatggccagccagagaacaactacaagaccacccctcctgtgctggactctgatggctccttcttcctggtctccaagctgactgtggacaagagccgctggcagcagggcaatgtgttctcctgctctgtcatgcatgaggccctgcacaaccactacacccagaagagcctgagcctgagccctggatga

SEQ ID NO: 115 - protein, 582 aa, Artificial Sequence; identical to SEQ ID NO: 107
  Synthesized

SEQ ID NO: 116 - DNA, 1749 bp, Artificial Sequence; identical to SEQ ID NO: 108
  Synthesized

SEQ ID NO: 117 - protein, 576 aa, Artificial Sequence; identical to SEQ ID NO: 105
  Synthesized

SEQ ID NO: 118 - DNA, 1731 bp, Artificial Sequence; identical to SEQ ID NO: 106
  Synthesized

SEQ ID NO: 119 - protein, 445 aa, Artificial Sequence; identical to SEQ ID NO: 67
  synthesized

SEQ ID NO: 120 - DNA, 1338 bp, Artificial Sequence; identical to SEQ ID NO: 68
  Synthesized

SEQ ID NO: 121 - protein, 442 aa, Artificial Sequence; identical to SEQ ID NO: 1
  Synthesized

SEQ ID NO: 122 - DNA, 1329 bp, Artificial Sequence; identical to SEQ ID NO: 114
  Synthesized

SEQ ID NO: 123 - protein, 582 aa, Artificial Sequence; identical to SEQ ID NO: 111
  Synthesized

SEQ ID NO: 124 - DNA, 1749 bp, Artificial Sequence; identical to SEQ ID NO: 112
  Synthesized

SEQ ID NO: 125 - protein, 576 aa, Artificial Sequence; identical to SEQ ID NO: 109
  Synthesized

SEQ ID NO: 126 - DNA, 1731 bp, Artificial Sequence; identical to SEQ ID NO: 110
  Synthesized

SEQ ID NO: 127 - protein, 445 aa, Artificial Sequence; identical to SEQ ID NO: 67
  Synthesized

SEQ ID NO: 128 - DNA, 1338 bp, Artificial Sequence; identical to SEQ ID NO: 68
  Synthesized

SEQ ID NO: 129 - protein, 963 aa, Artificial Sequence
  Synthesized
QIVLSQSPAILSASPGEKVTMTCRASSSVSYIHWFQQKPGSSPKPWIYATSNLASGVPVRFSGSGSGTSYSLTISRVEAEDAATYYCQQWTSNPPTFGGGTKLTVLGGGGSGGGGSGGGGSGGGGSQVQLQQPGAELVKPGASVKMSCKASGYTFTSYNMHWVKQTPGRGLEWIGAIYPGNGDTSYNQKFKGKATLTADKSSSTAYMQLSSLTSEDSAVYYCARSTYYGGDWYFNVWGAGTTVTVSSGGGGSGGGGSEVQLVESGGGLVQPGGSLRLSCAASGFTISTNAMSWVRQAPGKGLEWIGVITGRDITYYASWAKGRFTISRDNSKNTLYLQMNSLRAEDTAVYYCARDGGSSAITSNNIWGQGTLVTVSSASTKGPSVFPLAPSSKSTSGGTAALGCLVKDYFPEPVTVSWNSGALTSGVHTFPAVLQSSGLYSLSSVVTVPSSSLGTQTYICNVNHKPSNTKVDKRVEPKSCDKTHTCPPCPAPEAAGGPSVFLFPPKPKDTLMISRTPEVTCVVVDVSHEDPEVKFNWYVDGVEVHNAKTKPREEQYNSTYRVVSVLTVLHQDWLNGKEYKCAVSNKALPAPIEKTISKAKGQPREPQVYTLPPSRDELTKNQVSLSCAVKGFYPSDIAVEWESNGQPENNYKTTPPVLDSDGSFFLVSKLTVDKSRWQQGNVFSCSVMHEALHNHYTQKSLSLSPGGGGGSGGGGSDVVMTQSPSSVSASVGDRVTITCQASQNIRTYLSWYQQKPGKAPKLLIYAAANLASGVPSRFSGSGSGTDFTLTISDLEPGDAATYYCQSTYLGTDYVGGAFGGGTKLTVLGGGGSGGGGSGGGGSGGGGSEVQLVESGGGLVQPGGSLRLSCTASGFTISSYHMQWVRQAPGKGLEYIGTISSGGNVYYASSARGRFTISRPSSKNTVDLQMNSLRAEDTAVYYCARDSGYSDPMWGQGTLVTVSS

SEQ ID NO: 130 - DNA, 2892 bp, Artificial Sequence
  Synthesized
cagatcgtgctgagccagagccccgccatcctgagcgccagccccggcgagaaggtgaccatgacctgccgggccagcagcagcgtgagctacatccactggttccagcagaagcccggcagcagccccaagccctggatctacgccaccagcaacctggccagcggcgtgcccgtgcggttcagcggcagcggcagcggcaccagctacagcctgaccatcagccgggtggaggccgaggacgccgccacctactactgccagcagtggaccagcaacccccccaccttcggcggcggcaccaagctgaccgtgctgggcggtggcggtagtgggggaggcggttctggcggcggagggtccggcggtggaggatcacaggtgcagctgcagcagcccggcgccgagctggtgaagcccggcgccagcgtgaagatgagctgcaaggccagcggctacaccttcaccagctacaacatgcactgggtgaagcagacccccggccggggcctggagtggatcggcgccatctaccccggcaacggcgacaccagctacaaccagaagttcaagggcaaggccaccctgaccgccgacaagagcagcagcaccgcctacatgcagctgagcagcctgaccagcgaggacagcgccgtgtactactgcgcccggagcacctactacggcggcgactggtacttcaacgtgtggggcgccggcaccaccgtgaccgtctcgagcggcggtggagggtccggcggtggtggatcagaggtgcagctggtggagtctgggggaggcttggtccagcctggggggtccctgagactctcctgtgcagcctctggattcaccatcagtaccaatgcaatgagctgggtccgccaggctccagggaaggggctggagtggatcggagtcattactggtcgtgatatcacatactacgcgagctgggcgaaaggcagattcaccatctccagagacaattccaagaacacgctgtatcttcaaatgaacagcctgagagccgaggacacggctgtgtattactgtgcgagagacggtggttcttctgctattactagtaacaacatttggggccagggaaccctggtcaccgtgtcctcagctagcaccaagggcccatcggtcttccccctggcaccctcctccaagagcacctctgggggcacagcggccctgggctgcctggtcaaggactacttccccgaaccggtgacggtgtcgtggaactcaggcgccctgaccagcggcgtgcacaccttcccggctgtcctacagtcctcaggactctactccctcagcagcgtggtgaccgtgccctccagcagcttgggcacccagacctacatctgcaacgtgaatcacaagcccagcaacaccaaggtggacaagagagttgagcccaaatcttgtgacaaaactcacacatgcccaccgtgcccagcacctgaagccgcggggggaccgtcagtcttcctcttccccccaaaacccaaggacaccctcatgatctcccggacccctgaggtcacatgcgtggtggtggacgtgagccacgaagaccctgaggtcaagttcaactggtacgtggacggcgtggaggtgcataatgccaagacaaagccgcgggaggagcagtacaacagcacgtaccgtgtggtcagcgtcctcaccgtcctgcaccaggactggctgaatggcaaggagtacaagtgcgcggtctccaacaaagccctcccagcccccatcgagaaaaccatctccaaagccaaagggcagccccgagaaccacaggtgtataccctgcccccatcccgggatgagctgaccaagaaccaggtcagcctgtcctgcgccgtcaaaggcttctatcccagcgacatcgccgtggagtgggagagcaatgggcagccggagaacaactacaagaccacgcctcccgtgctggactccgacggctccttcttcctcgtgagcaagctcaccgtggacaagagcaggtggcagcaggggaacgtcttctcatgctccgtgatgcatgaggctctgcacaaccactacacgcagaagagcctctccctgtctccgggtggcggcggcggttcaggtggtgggggatccgacgttgtgatgacgcagtctcctagttcagtatcagcgtctgttggggatcgagtcacgattacatgccaggcgagccaaaatattaggacgtatctgtcttggtatcaacaaaagcctggtaaggctccaaaactcctcatttacgccgctgccaacttggctagtggagtaccttcacgctttagtgggtcaggttctggaacagattttacgttgacgatctccgatttggaaccaggggacgctgccacgtattattgccagtccacctacctcgggactgactacgttggtggggcgtttggcggaggaacaaaactcactgtacttggtggtggtggttcaggcggggggggttccggcggaggcggttctgggggtggaggttccgaggttcagttggttgaaagtggggggggactcgttcagcctggaggctctttgcgactttcttgtaccgcttctgggttcactataagttcatatcatatgcaatgggtaagacaggcgcctggtaagggacttgaatacataggaacaataagctctggtggtaacgtctattacgcctcatccgcgcgggggaggtttacaatttccaggccttctagcaaaaacacggtagatctgcaaatgaactctcttcgcgctgaagatacagcagtctactactgcgccagggattcagggtattctgaccccatgtgggggcagggcacattggttaccgtgtcctcttga

SEQ ID NO: 131 - protein, 965 aa, Artificial Sequence; identical to SEQ ID NO: 71
  Synthesized

SEQ ID NO: 132 - DNA, 2898 bp, Artificial Sequence; identical to SEQ ID NO: 72
  Synthesized

SEQ ID NO: 133 - protein, 963 aa, Artificial Sequence
  Synthesized
QIVLSQSPAILSASPGEKVTMTCRASSSVSYIHWFQQKPGSSPKPWIYATSNLASGVPVRFSGSGSGTSYSLTISRVEAEDAATYYCQQWTSNPPTFGGGTKLTVLGGGGSGGGGSGGGGSGGGGSQVQLQQPGAELVKPGASVKMSCKASGYTFTSYNMHWVKQTPGRGLEWIGAIYPGNGDTSYNQKFKGKATLTADKSSSTAYMQLSSLTSEDSAVYYCARSTYYGGDWYFNVWGAGTTVTVSSGGGGSGGGGSEVQLVESGGGLVQPGGSLRLSCAASGFTISTNAMSWVRQAPGKCLEWIGVITGRDITYYASWAKGRFTISRDNSKNTLYLQMNSLRAEDTAVYYCARDGGSSAITSNNIWGQGTLVTVSSASTKGPSVFPLAPSSKSTSGGTAALGCLVKDYFPEPVTVSWNSGALTSGVHTFPAVLQSSGLYSLSSVVTVPSSSLGTQTYICNVNHKPSNTKVDKRVEPKSCDKTHTCPPCPAPEAAGGPSVFLFPPKPKDTLMISRTPEVTCVVVDVSHEDPEVKFNWYVDGVEVHNAKTKPREEQYNSTYRVVSVLTVLHQDWLNGKEYKCAVSNKALPAPIEKTISKAKGQPREPQVYTLPPSRDELTKNQVSLSCAVKGFYPSDIAVEWESNGQPENNYKTTPPVLDSDGSFFLVSKLTVDKSRWQQGNVFSCSVMHEALHNHYTQKSLSLSPGGGGGSGGGGSDVVMTQSPSSVSASVGDRVTITCQASQNIRTYLSWYQQKPGKAPKLLIYAAANLASGVPSRFSGSGSGTDFTLTISDLEPGDAATYYCQSTYLGTDYVGGAFGGGTKLTVLGGGGSGGGGSGGGGSGGGGSEVQLVESGGGLVQPGGSLRLSCTASGFTISSYHMQWVRQAPGKGLEYIGTISSGGNVYYASSARGRFTISRPSSKNTVDLQMNSLRAEDTAVYYCARDSGYSDPMWGQGTLVTVSS

SEQ ID NO: 134 - DNA, 2892 bp, Artificial Sequence
  Synthesized
cagatcgtgctgagccagagccccgccatcctgagcgccagccccggcgagaaggtgaccatgacctgccgggccagcagcagcgtgagctacatccactggttccagcagaagcccggcagcagccccaagccctggatctacgccaccagcaacctggccagcggcgtgcccgtgcggttcagcggcagcggcagcggcaccagctacagcctgaccatcagccgggtggaggccgaggacgccgccacctactactgccagcagtggaccagcaacccccccaccttcggcggcggcaccaagctgaccgtgctgggcggtggcggtagtgggggaggcggttctggcggcggagggtccggcggtggaggatcacaggtgcagctgcagcagcccggcgccgagctggtgaagcccggcgccagcgtgaagatgagctgcaaggccagcggctacaccttcaccagctacaacatgcactgggtgaagcagacccccggccggggcctggagtggatcggcgccatctaccccggcaacggcgacaccagctacaaccagaagttcaagggcaaggccaccctgaccgccgacaagagcagcagcaccgcctacatgcagctgagcagcctgaccagcgaggacagcgccgtgtactactgcgcccggagcacctactacggcggcgactggtacttcaacgtgtggggcgccggcaccaccgtgaccgtctcgagcggcggtggagggtccggcggtggtggatcagaggtgcagctggtggagtctgggggaggcttggtccagcctggggggtccctgagactctcctgtgcagcctctggattcaccatcagtaccaatgcaatgagctgggtccgccaggctccagggaagtgtctggagtggatcggagtcattactggtcgtgatatcacatactacgcgagctgggcgaaaggcagattcaccatctccagagacaattccaagaacacgctgtatcttcaaatgaacagcctgagagccgaggacacggctgtgtattactgtgcgagagacggtggttcttctgctattactagtaacaacatttggggccagggaaccctggtcaccgtgtcctcagctagcaccaagggcccatcggtcttccccctggcaccctcctccaagagcacctctgggggcacagcggccctgggctgcctggtcaaggactacttccccgaaccggtgacggtgtcgtggaactcaggcgccctgaccagcggcgtgcacaccttcccggctgtcctacagtcctcaggactctactccctcagcagcgtggtgaccgtgccctccagcagcttgggcacccagacctacatctgcaacgtgaatcacaagcccagcaacaccaaggtggacaagagagttgagcccaaatcttgtgacaaaactcacacatgcccaccgtgcccagcacctgaagccgcggggggaccgtcagtcttcctcttccccccaaaacccaaggacaccctcatgatctcccggacccctgaggtcacatgcgtggtggtggacgtgagccacgaagaccctgaggtcaagttcaactggtacgtggacggcgtggaggtgcataatgccaagacaaagccgcgggaggagcagtacaacagcacgtaccgtgtggtcagcgtcctcaccgtcctgcaccaggactggctgaatggcaaggagtacaagtgcgcggtctccaacaaagccctcccagcccccatcgagaaaaccatctccaaagccaaagggcagccccgagaaccacaggtgtataccctgcccccatcccgggatgagctgaccaagaaccaggtcagcctgtcctgcgccgtcaaaggcttctatcccagcgacatcgccgtggagtgggagagcaatgggcagccggagaacaactacaagaccacgcctcccgtgctggactccgacggctccttcttcctcgtgagcaagctcaccgtggacaagagcaggtggcagcaggggaacgtcttctcatgctccgtgatgcatgaggctctgcacaaccactacacgcagaagagcctctccctgtctccgggtggcggcggcggttcaggtggtgggggatccgacgttgtgatgacgcagtctcctagttcagtatcagcgtctgttggggatcgagtcacgattacatgccaggcgagccaaaatattaggacgtatctgtcttggtatcaacaaaagcctggtaaggctccaaaactcctcatttacgccgctgccaacttggctagtggagtaccttcacgctttagtgggtcaggttctggaacagattttacgttgacgatctccgatttggaaccaggggacgctgccacgtattattgccagtccacctacctcgggactgactacgttggtggggcgtttggcggaggaacaaaactcactgtacttggtggtggtggttcaggcggggggggttccggcggaggcggttctgggggtggaggttccgaggttcagttggttgaaagtggggggggactcgttcagcctggaggctctttgcgactttcttgtaccgcttctgggttcactataagttcatatcatatgcaatgggtaagacaggcgcctggtaagggacttgaatacataggaacaataagctctggtggtaacgtctattacgcctcatccgcgcgggggaggtttacaatttccaggccttctagcaaaaacacggtagatctgcaaatgaactctcttcgcgctgaagatacagcagtctactactgcgccagggattcagggtattctgaccccatgtgggggcagggcacattggttaccgtgtcctcttga

SEQ ID NO: 135 - protein, 965 aa, Artificial Sequence
  Synthesized
ENVLTQSPASLSASPGERVTITCSASSSVSYMHWYQQKPGQAPKLWIYDTSKLASGVPSRFSGSGSGNDHTLTISSMEPEDFATYYCFQGSVYPFTFGQGTKVTVLGGGGSGGGGSGGGGSGGGGSQVTLKESGPGLVQPGQTLSLTCAFSGFSLSTSGMGVGWIRQPPGKGLEWLAHIWWDDDKRYNPALKSRLTISKDTSKNQVYLQMNSLDAEDTAVYYCARMELWSYYFDYWGQGTLVTVSSGGGGSGGGGSDVVMTQSPSTLSASVGDRVTINCQASESISSWLAWYQQKPGKAPKLLIYEASKLASGVPSRFSGSGSGTEFTLTISSLQPDDFATYYCQGYFYFISRTYVNSFGCGTKVEIKRTVAAPSVFIFPPSDEQLKSGTASVVCLLNNFYPREAKVQWKVDNALQSGNSQESVTEQDSKDSTYSLSSTLTLSKADYEKHKVYACEVTHQGLSSPVTKSFNRGECGGDKTHTCPPCPAPEAAGGPSVFLFPPKPKDTLMISRTPEVTCVVVDVSHEDPEVKFNWYVDGVEVHNAKTKPREEQYNSTYRVVSVLTVLHQDWLNGKEYKCAVSNKALPAPIEKTISKAKGQPREPQVYTLPPSRDELTKNQVSLWCLVKGFYPSDIAVEWESNGQPENNYKTTPPVLDSDGSFFLYSKLTVDKSRWQQGNVFSCSVMHEALHNRFTQKSLSLSPGGGGGSGGGGSDIQMTQSPSTLSASVGDRVTITCQASQSISSHLNWYQQKPGKAPKLLIYKASTLASGVPSRFSGSGSGTEFTLTISSLQPDDFATYYCQQGYSWGNVDNVFGGGTKVTVLGGGGSGGGGSGGGGSGGGGSEVQLLESGGGLVQPGGSLSLSCAASGFSFSSGYDMCWVRQAPGKGLEWIACIAAGSAGITYDANWAKGRFTISRDNSKNTLYLQMNSLRAEDTAVYYCARSAFSFDYAMDLWGQGTLVTVSS

SEQ ID NO: 136 - DNA, 2898 bp, Artificial Sequence
  Synthesized
gaaaatgtattgacacagagccccgcctccctcagtgcctcacctggggaaagggtaactatcacttgctctgcatcaagcagcgtctcatacatgcattggtatcaacaaaagcctggacaggcccccaagctctggatatacgatacgagcaagctggcttccggcgtacctagccgcttcagtggttccggctcaggcaacgatcacacccttacgatttccagtatggaacccgaagattttgcaacttattattgtttccaggggagcgtgtacccattcactttcgggcaggggacaaaagtgaccgtcctaggcggtggcggtagtgggggaggcggttctggcggcggagggtccggcggtggaggatcacaggtcacattgaaggaatctggccccggccttgttcagccaggacagacccttagcctcacctgtgccttcagtggtttttctcttagcactagcggtatgggggtcggctggattcggcagcctcccggcaaaggtcttgagtggttggctcacatttggtgggacgacgacaaacggtataatcctgccttgaaaagtcggctgaccattagtaaggatacctcaaaaaatcaagtgtacttgcaaatgaatagccttgacgccgaggatacggctgtatattattgcgcgcggatggaactctggtcttactactttgattattgggggcaggggactctcgtcacggtctcgagcggcggtggagggtccggcggtggtggatcagacgtcgtgatgacccagtctccttccaccctgtctgcatctgtaggagacagagtcaccatcaattgccaagccagtgagagcattagcagttggttagcctggtatcagcagaaaccagggaaagcccctaagctcctgatctatgaagcatccaaactggcatctggggtcccatcaaggttcagcggcagtggatctgggacagaattcactctcaccatcagcagcctgcagcctgatgattttgcaacttattactgccaaggctatttttattttattagtcgtacttatgtaaattctttcggctgtgggaccaaggtggagatcaaacgtacggtggctgcaccatctgtcttcatcttcccgccatctgatgagcagttgaaatctggaactgcctctgttgtgtgcctgctgaataacttctatcccagagaggccaaagtacagtggaaggtggataacgccctccaatcgggtaactcccaggagagtgtcacagagcaggacagcaaggacagcacctacagcctcagcagcaccctgacgctgagcaaagcagactacgagaaacacaaagtctacgcctgcgaagtcacccatcagggcctgagctcgcccgtcacaaagagcttcaacaggggagagtgtggaggcgacaaaactcacacatgcccaccgtgcccagcacctgaagccgcggggggaccgtcagtcttcctcttccccccaaaacccaaggacaccctcatgatctcccggacccctgaggtcacatgcgtggtggtggacgtgagccacgaagaccctgaggtcaagttcaactggtacgtggacggcgtggaggtgcataatgccaagacaaagccgcgggaggagcagtacaacagcacgtaccgtgtggtcagcgtcctcaccgtcctgcaccaggactggctgaatggcaaggagtacaagtgcgcggtctccaacaaagccctcccagcccccatcgagaaaaccatctccaaagccaaagggcagccccgagaaccacaggtgtacaccctgcccccaagccgggatgagctgaccaagaaccaggtcagcctgtggtgcctggtcaaaggcttctatcccagcgacatcgccgtggagtgggagagcaatgggcagccggagaacaactacaagaccacgcctcccgtgctggactccgacggctccttcttcctctatagcaagctcaccgtggacaagagcaggtggcagcaggggaacgtcttctcatgctccgtgatgcatgaggctctgcacaacagattcacgcagaagagcctctccctgtctccgggtggcggtggagggtccggcggtggtggatccgacattcagatgacacagtcaccgtctacgctctcagcctcagtaggcgatagggtgactatcacctgccaagcctcccaatctataagttcacacctcaactggtatcaacagaaacccggtaaagcaccgaagctgctcatctacaaggcatcaactcttgcctcaggtgtgcctagtcgcttctccgggagcggctccggtactgagtttactttgacgatatcttccctccaacccgacgacttcgccacatactattgtcagcagggttatagttggggaaatgttgacaatgtgtttggagggggaacgaaagtgactgtgttgggagggggaggaagtggcggcggcggaagcggaggtggtggctccggcgggggtggaagcgaagtgcaattgctcgaaagtggtggcggacttgtgcaacctggtggaagcctctcactctcttgcgcggcgagtggttttagcttcagtagcggctacgatatgtgctgggtaagacaggctcctggtaaaggccttgagtggattgcgtgtatcgccgccgggtctgctggtataacatacgatgcaaactgggcgaaagggcgcttcacaatctccagggacaactcaaaaaatacattgtacctccagatgaatagcctgagagccgaagacaccgcagtctactattgcgcaaggtcagcatttagcttcgattatgcaatggatctttggggccaggggacgctcgtcaccgtctcatcttga

SEQ ID NO: 137 - protein, 706 aa, Artificial Sequence
  Synthesized
DIQMTQSPSSLSASVGDRVTITCQASQDISNYLNWYQQKPGKAPKLLIYDASNLETGVPSRFSGSGSGTDFTFTISSLQPEDIATYFCQHFDHLPLAFGCGTKVEIKGGGGSGGGGSGGGGSGGGGSQVQLQESGPGLVKPSETLSLTCTVSGGSVSSGDYYWTWIRQSPGKCLEWIGHIYYSGNTNYNPSLKSRLTISIDTSKTQFSLKLSSVTAADTAIYYCVRDRVTGAFDIWGQGTMVTVSTGGGGSGGGGSEVQLVESGGGLVQPGGSLRLSCAASGFTISTNAMSWVRQAPGKGLEWIGVITGRDITYYASWAKGRFTISRDNSKNTLYLQMNSLRAEDTAVYYCARDGGSSAITSNNIWGQGTLVTVSSASTKGPSVFPLAPSSKSTSGGTAALGCLVKDYFPEPVTVSWNSGALTSGVHTFPAVLQSSGLYSLSSVVTVPSSSLGTQTYICNVNHKPSNTKVDKRVEPKSCDKTHTCPPCPAPEAAGGPSVFLFPPKPKDTLMISRTPEVTCVVVDVSHEDPEVKFNWYVDGVEVHNAKTKPREEQYASTYRVVSVLTVLHQDWLNGKEYKCAVSNKALPAPIEKTISKAKGQPREPQVCTLPPSRDELTKNQVSLSCAVKGFYPSDIAVEWESNGQPENNYKTTPPVLDSDGSFFLVSKLTVDKSRWQQGNVFSCSVMHEALHNHYTQKSLSLSPGK

SEQ ID NO: 138 - protein, 2121 aa, Artificial Sequence
  Synthesized
GACATCCAGATGACCCAGTCTCCATCCTCCCTGTCTGCATCTGTAGGAGACAGAGTCACCATCACTTGCCAGGCGAGTCAGGACATCAGCAACTATTTAAATTGGTATCAGCAGAAACCAGGGAAAGCCCCTAAACTCCTGATCTACGATGCATCCAATTTGGAAACAGGGGTCCCATCAAGGTTCAGTGGAAGTGGATCTGGGACAGATTTTACTTTCACCATCAGCAGCCTGCAGCCTGAAGATATTGCAACATATTTCTGTCAACACTTTGATCATCTCCCGCTCGCTTTCGGCTGTGGGACCAAGGTGGAAATTAAAGGCGGTGGCGGTAGTGGGGGAGGCGGTTCTGGCGGCGGAGGGTCCGGCGGTGGAGGATCACAGGTGCAGCTGCAGGAGTCGGGCCCAGGACTGGTGAAGCCTTCGGAGACCCTGTCCCTCACCTGCACTGTCTCTGGTGGCTCCGTCAGCAGTGGTGATTACTACTGGACCTGGATCCGGCAGTCCCCAGGGAAGTGCCTGGAGTGGATTGGACACATCTATTACAGTGGGAACACCAATTATAACCCCTCCCTCAAGAGCCGACTCACCATATCAATTGACACGTCCAAGACTCAGTTCTCCCTGAAGCTGAGTTCTGTGACCGCTGCGGACACGGCCATTTATTACTGTGTGCGAGATCGAGTGACTGGTGCTTTTGATATCTGGGGCCAAGGGACAATGGTCACCGTGTCGACAGGCGGTGGAGGGTCCGGCGGTGGTGGATCAGAGGTGCAGCTGGTGGAGTCTGGGGGAGGCTTGGTCCAGCCTGGGGGGTCCCTGAGACTCTCCTGTGCAGCCTCTGGATTCACCATCAGTACCAATGCAATGAGCTGGGTCCGCCAGGCTCCAGGGAAGGGGCTGGAGTGGATCGGAGTCATTACTGGTCGTGATATCACATACTACGCGAGCTGGGCGAAAGGCAGATTCACCATCTCCAGAGACAATTCCAAGAACACGCTGTATCTTCAAATGAACAGCCTGAGAGCCGAGGACACGGCTGTGTATTACTGTGCGAGAGACGGTGGTTCTTCTGCTATTACTAGTAACAACATTTGGGGCCAGGGAACCCTGGTCACCGTGTCCTCAGCTAGCACCAAGGGCCCATCGGTCTTCCCCCTGGCACCCTCCTCCAAGAGCACCTCTGGGGGCACAGCGGCCCTGGGCTGCCTGGTCAAGGACTACTTCCCCGAACCGGTGACGGTGTCGTGGAACTCAGGCGCCCTGACCAGCGGCGTGCACACCTTCCCGGCTGTCCTACAGTCCTCAGGACTCTACTCCCTCAGCAGCGTGGTGACCGTGCCCTCCAGCAGCTTGGGCACCCAGACCTACATCTGCAACGTGAATCACAAGCCCAGCAACACCAAGGTGGACAAGAGAGTTGAGCCCAAATCTTGTGACAAAACTCACACATGCCCACCGTGCCCAGCACCTGAAGCCGCGGGGGGACCGTCAGTCTTCCTCTTCCCCCCAAAACCCAAGGACACCCTCATGATCTCCCGGACCCCTGAGGTCACATGCGTGGTGGTGGACGTGAGCCACGAAGACCCTGAGGTCAAGTTCAACTGGTACGTGGACGGCGTGGAGGTGCATAATGCCAAGACAAAGCCGCGGGAGGAGCAGTACGCCAGCACGTACCGTGTGGTCAGCGTCCTCACCGTCCTGCACCAGGACTGGCTGAATGGCAAGGAGTACAAGTGCGCGGTCTCCAACAAAGCCCTCCCAGCCCCCATCGAGAAAACCATCTCCAAAGCCAAAGGGCAGCCCCGAGAACCACAGGTGTGTACCCTGCCCCCATCCCGGGATGAGCTGACCAAGAACCAGGTCAGCCTGTCCTGCGCCGTCAAAGGCTTCTATCCCAGCGACATCGCCGTGGAGTGGGAGAGCAATGGGCAGCCGGAGAACAACTACAAGACCACGCCTCCCGTGCTGGACTCCGACGGCTCCTTCTTCCTCGTGAGCAAGCTCACCGTGGACAAGAGCAGGTGGCAGCAGGGGAACGTCTTCTCATGCTCCGTGATGCATGAGGCTCTGCACAACCACTACACGCAGAAGAGCCTCTCCCTGTCTCCGGGTAAATAG

SEQ ID NO: 139 - protein, 707 aa, Artificial Sequence
  Synthesized
QSALTQPASVSGSPGQSITISCTGTSSDVGGYNFVSWYQQHPGKAPKLMIYDVSDRPSGVSDRFSGSKSGNTASLIISGLQADDEADYYCSSYGSSSTHVIFGCGTKVTVLGGGGSGGGGSGGGGSGGGGSQVQLQESGGGLVKPGGSLRLSCAASGFTFSSYWMSWVRQAPGKCLEWVANINRDGSASYYVDSVKGRFTISRDDAKNSLYLQMNSLRAEDTAVYYCARDRGVGYFDLWGRGTLVTVSTGGGGSGGGGSDVVMTQSPSTLSASVGDRVTINCQASESISSWLAWYQQKPGKAPKLLIYEASKLASGVPSRFSGSGSGTEFTLTISSLQPDDFATYYCQGYFYFISRTYVNSFGGGTKVEIKRTVAAPSVFIFPPSDEQLKSGTASVVCLLNNFYPREAKVQWKVDNALQSGNSQESVTEQDSKDSTYSLSSTLTLSKADYEKHKVYACEVTHQGLSSPVTKSFNRGECGGDKTHTCPPCPAPEAAGGPSVFLFPPKPKDTLMISRTPEVTCVVVDVSHEDPEVKFNWYVDGVEVHNAKTKPREEQYASTYRVVSVLTVLHQDWLNGKEYKCAVSNKALPAPIEKTISKAKGQPREPQVYTLPPCRDELTKNQVSLWCLVKGFYPSDIAVEWESNGQPENNYKTTPPVLDSDGSFFLYSKLTVDKSRWQQGNVFSCSVMHEALHNHYTQKSLSLSPGK

SEQ ID NO: 140 - DNA, 2124 bp, Artificial Sequence
  Synthesized
cagtctgccctgactcagcctgcctccgtgtctgggtctcctggacagtcgatcaccatctcctgcactggaaccagcagtgacgttggtggttataactttgtctcctggtaccaacaacacccaggcaaagcccccaaactcatgatctatgatgtcagtgatcggccctcaggggtgtctgatcgcttctccggctccaagtctggcaacacggcctccctgatcatctctggcctccaggctgacgacgaggctgattattactgcagctcatatgggagcagcagcactcatgtgattttcggctgtgggaccaaggtgaccgtcctaggcggtggcggtagtgggggaggcggttctggcggcggagggtccggcggtggaggatcacaggtgcaattgcaggagtcggggggaggcctggtcaagcctggagggtccctgagactctcctgtgcagcctctggattcacctttagtagttattggatgagctgggtccgccaggctccagggaagtgcctggagtgggtggccaacataaaccgcgatggaagtgcgagttactatgtggactctgtgaagggccgattcaccatctccagagacgacgccaagaactcactgtatctgcaaatgaacagcctgagagctgaggacacggctgtgtattactgtgcgagagatcgtggggtgggctacttcgatctctggggccgtggcaccctggtcaccgtgtcgacaggcggtggagggtccggcggtggtggatcagacgtcgtgatgacccagtctccttccaccctgtctgcatctgtaggagacagagtcaccatcaattgccaagccagtgagagcattagcagttggttagcctggtatcagcagaaaccagggaaagcccctaagctcctgatctatgaagcatccaaactggcatctggggtcccatcaaggttcagcggcagtggatctgggacagaattcactctcaccatcagcagcctgcagcctgatgattttgcaacttattactgccaaggctatttttattttattagtcgtacttatgtaaattctttcggcggagggaccaaggtggagatcaaacgtacggtggctgcaccatctgtcttcatcttcccgccatctgatgagcagttgaaatctggaactgcctctgttgtgtgcctgctgaataacttctatcccagagaggccaaagtacagtggaaggtggataacgccctccaatcgggtaactcccaggagagtgtcacagagcaggacagcaaggacagcacctacagcctcagcagcaccctgacgctgagcaaagcagactacgagaaacacaaagtctacgcctgcgaagtcacccatcagggcctgagctcgcccgtcacaaagagcttcaacaggggagagtgtggaggcgacaaaactcacacatgcccaccgtgcccagcacctgaagccgcggggggaccgtcagtcttcctcttccccccaaaacccaaggacaccctcatgatctcccggacccctgaggtcacatgcgtggtggtggacgtgagccacgaagaccctgaggtcaagttcaactggtacgtggacggcgtggaggtgcataatgccaagacaaagccgcgggaggagcagtacgccagcacgtaccgtgtggtcagcgtcctcaccgtcctgcaccaggactggctgaatggcaaggagtacaagtgcgcggtctccaacaaagccctcccagcccccatcgagaaaaccatctccaaagccaaagggcagccccgagaaccacaggtgtacaccctgcccccatgtcgggatgagctgaccaagaaccaggtcagcctgtggtgcctggtcaaaggcttctatcccagcgacatcgccgtggagtgggagagcaatgggcagccggagaacaactacaagaccacgcctcccgtgctggactccgacggctccttcttcctctatagcaagctcaccgtggacaagagcaggtggcagcaggggaacgtcttctcatgctccgtgatgcatgaggctctgcacaaccactacacgcagaagagcctctccctgtctccgggtaaatag

SEQ ID NO: 141 - protein, 961 aa, Artificial Sequence
  Synthesized
DIQMTQSPSSLSASVGDRVTITCQASQDISNYLNWYQQKPGKAPKLLIYDASNLETGVPSRFSGSGSGTDFTFTISSLQPEDIATYFCQHFDHLPLAFGCGTKVEIKGGGGSGGGGSGGGGSGGGGSQVQLQESGPGLVKPSETLSLTCTVSGGSVSSGDYYWTWIRQSPGKCLEWIGHIYYSGNTNYNPSLKSRLTISIDTSKTQFSLKLSSVTAADTAIYYCVRDRVTGAFDIWGQGTMVTVSTGGGGSGGGGSEVQLVESGGGLVQPGGSLRLSCAASGFTISTNAMSWVRQAPGKGLEWIGVITGRDITYYASWAKGRFTISRDNSKNTLYLQMNSLRAEDTAVYYCARDGGSSAITSNNIWGQGTLVTVSSASTKGPSVFPLAPSSKSTSGGTAALGCLVKDYFPEPVTVSWNSGALTSGVHTFPAVLQSSGLYSLSSVVTVPSSSLGTQTYICNVNHKPSNTKVDKRVEPKSCDKTHTCPPCPAPEAAGGPSVFLFPPKPKDTLMISRTPEVTCVVVDVSHEDPEVKFNWYVDGVEVHNAKTKPREEQYASTYRVVSVLTVLHQDWLNGKEYKCAVSNKALPAPIEKTISKAKGQPREPQVCTLPPSRDELTKNQVSLSCAVKGFYPSDIAVEWESNGQPENNYKTTPPVLDSDGSFFLVSKLTVDKSRWQQGNVFSCSVMHEALHNHYTQKSLSLSPGGGGGSGGGGSRSLVESGGGLVQPGGSLRLSCTASGFTISSYHMQWVRQAPGKCLEYIGTISSGGNVYYASSARGRFTISRPSSKNTVDLQMNSLRAEDTAVYYCARDSGYSDPMWGQGTLVTVSSGGGGSGGGGSGGGGSGGGGSDVVMTQSPSSVSASVGDRVTITCQASQNIRTYLSWYQQKPGKAPKLLIYAAANLASGVPSRFSGSGSGTDFTLTISDLEPGDAATYYCQSTYLGTDYVGGAFGCGTKVEIK

SEQ ID NO: 142 - DNA, 2886 bp, Artificial Sequence
  Synthesized
gacatccagatgacccagtctccatcctccctgtctgcatctgtaggagacagagtcaccatcacttgccaggcgagtcaggacatcagcaactatttaaattggtatcagcagaaaccagggaaagcccctaaactcctgatctacgatgcatccaatttggaaacaggggtcccatcaaggttcagtggaagtggatctgggacagattttactttcaccatcagcagcctgcagcctgaagatattgcaacatatttctgtcaacactttgatcatctcccgctcgctttcggctgtgggaccaaggtggaaattaaaggcggtggcggtagtgggggaggcggttctggcggcggagggtccggcggtggaggatcacaggtgcagctgcaggagtcgggcccaggactggtgaagccttcggagaccctgtccctcacctgcactgtctctggtggctccgtcagcagtggtgattactactggacctggatccggcagtccccagggaagtgcctggagtggattggacacatctattacagtgggaacaccaattataacccctccctcaagagccgactcaccatatcaattgacacgtccaagactcagttctccctgaagctgagttctgtgaccgctgcggacacggccatttattactgtgtgcgagatcgagtgactggtgcttttgatatctggggccaagggacaatggtcaccgtgtcgacaggcggtggagggtccggcggtggtggatcagaggtgcagctggtggagtctgggggaggcttggtccagcctggggggtccctgagactctcctgtgcagcctctggattcaccatcagtaccaatgcaatgagctgggtccgccaggctccagggaaggggctggagtggatcggagtcattactggtcgtgatatcacatactacgcgagctgggcgaaaggcagattcaccatctccagagacaattccaagaacacgctgtatcttcaaatgaacagcctgagagccgaggacacggctgtgtattactgtgcgagagacggtggttcttctgctattactagtaacaacatttggggccagggaaccctggtcaccgtgtcctcagctagcaccaagggcccatcggtcttccccctggcaccctcctccaagagcacctctgggggcacagcggccctgggctgcctggtcaaggactacttccccgaaccggtgacggtgtcgtggaactcaggcgccctgaccagcggcgtgcacaccttcccggctgtcctacagtcctcaggactctactccctcagcagcgtggtgaccgtgccctccagcagcttgggcacccagacctacatctgcaacgtgaatcacaagcccagcaacaccaaggtggacaagagagttgagcccaaatcttgtgacaaaactcacacatgcccaccgtgcccagcacctgaagccgcggggggaccgtcagtcttcctcttccccccaaaacccaaggacaccctcatgatctcccggacccctgaggtcacatgcgtggtggtggacgtgagccacgaagaccctgaggtcaagttcaactggtacgtggacggcgtggaggtgcataatgccaagacaaagccgcgggaggagcagtacgccagcacgtaccgtgtggtcagcgtcctcaccgtcctgcaccaggactggctgaatggcaaggagtacaagtgcgcggtctccaacaaagccctcccagcccccatcgagaaaaccatctccaaagccaaagggcagccccgagaaccacaggtgtgtaccctgcccccatcccgggatgagctgaccaagaaccaggtcagcctgtcctgcgccgtcaaaggcttctatcccagcgacatcgccgtggagtgggagagcaatgggcagccggagaacaactacaagaccacgcctcccgtgctggactccgacggctccttcttcctcgtgagcaagctcaccgtggacaagagcaggtggcagcaggggaacgtcttctcatgctccgtgatgcatgaggctctgcacaaccactacacgcagaagagcctctccctgtctccgggtggcggtggagggtccggcggtggtggatcccggtcgctggtggagtctgggggaggcttggtccagcctggggggtccctgagactctcctgtactgcctctggattcaccatcagtagctaccacatgcagtgggtccggcaggcacctgggaagtgcctggagtacatcggaaccattagtagtggtggtaatgtatactacgcaagctccgctagaggcagattcaccatctccagaccctcgtccaagaacacggtggatcttcaaatgaacagcctgagagccgaggacacggctgtgtattactgtgcgagagactctggttatagtgatcctatgtggggccagggaaccctggtcaccgtctcttcaggcggtggcggtagtgggggaggcggttctggcggcggagggtccggcggtggaggatcagacgttgtgatgacccagtctccatcttccgtgtctgcatctgtaggagacagagtcaccatcacctgtcaggccagtcagaacattaggacttacttatcctggtatcagcagaaaccagggaaagcccctaagctcctgatctatgctgcagccaatctggcatctggggtcccatcaaggttcagcggcagtggatctgggacagatttcactctcaccatcagcgacttggaacctggcgatgctgcaacttactattgtcagtctacctatcttggtactgattatgttggcggtgctttcggctgtgggaccaaggtggagatcaaatga

SEQ ID NO: 143 - protein, 707 aa, Artificial Sequence; identical to SEQ ID NO: 139
  Synthesized

SEQ ID NO: 144 - DNA, 2124 bp, Artificial Sequence; identical to SEQ ID NO: 140
  Synthesized

SEQ ID NO: 145 - protein, 706 aa, Artificial Sequence; identical to SEQ ID NO: 137
  Synthesized

SEQ ID NO: 146 - DNA, 2121 bp, Artificial Sequence
  Synthesized
gacatccagatgacccagtctccatcctccctgtctgcatctgtaggagacagagtcaccatcacttgccaggcgagtcaggacatcagcaactatttaaattggtatcagcagaaaccagggaaagcccctaaactcctgatctacgatgcatccaatttggaaacaggggtcccatcaaggttcagtggaagtggatctgggacagattttactttcaccatcagcagcctgcagcctgaagatattgcaacatatttctgtcaacactttgatcatctcccgctcgctttcggctgtgggaccaaggtggaaattaaaggcggtggcggtagtgggggaggcggttctggcggcggagggtccggcggtggaggatcacaggtgcagctgcaggagtcgggcccaggactggtgaagccttcggagaccctgtccctcacctgcactgtctctggtggctccgtcagcagtggtgattactactggacctggatccggcagtccccagggaagtgcctggagtggattggacacatctattacagtgggaacaccaattataacccctccctcaagagccgactcaccatatcaattgacacgtccaagactcagttctccctgaagctgagttctgtgaccgctgcggacacggccatttattactgtgtgcgagatcgagtgactggtgcttttgatatctggggccaagggacaatggtcaccgtgtcgacaggcggtggagggtccggcggtggtggatcagaggtgcagctggtggagtctgggggaggcttggtccagcctggggggtccctgagactctcctgtgcagcctctggattcaccatcagtaccaatgcaatgagctgggtccgccaggctccagggaaggggctggagtggatcggagtcattactggtcgtgatatcacatactacgcgagctgggcgaaaggcagattcaccatctccagagacaattccaagaacacgctgtatcttcaaatgaacagcctgagagccgaggacacggctgtgtattactgtgcgagagacggtggttcttctgctattactagtaacaacatttggggccagggaaccctggtcaccgtgtcctcagctagcaccaagggcccatcggtcttccccctggcaccctcctccaagagcacctctgggggcacagcggccctgggctgcctggtcaaggactacttccccgaaccggtgacggtgtcgtggaactcaggcgccctgaccagcggcgtgcacaccttcccggctgtcctacagtcctcaggactctactccctcagcagcgtggtgaccgtgccctccagcagcttgggcacccagacctacatctgcaacgtgaatcacaagcccagcaacaccaaggtggacaagagagttgagcccaaatcttgtgacaaaactcacacatgcccaccgtgcccagcacctgaagccgcggggggaccgtcagtcttcctcttccccccaaaacccaaggacaccctcatgatctcccggacccctgaggtcacatgcgtggtggtggacgtgagccacgaagaccctgaggtcaagttcaactggtacgtggacggcgtggaggtgcataatgccaagacaaagccgcgggaggagcagtacgccagcacgtaccgtgtggtcagcgtcctcaccgtcctgcaccaggactggctgaatggcaaggagtacaagtgcgcggtctccaacaaagccctcccagcccccatcgagaaaaccatctccaaagccaaagggcagccccgagaaccacaggtgtgtaccctgcccccatcccgggatgagctgaccaagaaccaggtcagcctgtcctgcgccgtcaaaggcttctatcccagcgacatcgccgtggagtgggagagcaatgggcagccggagaacaactacaagaccacgcctcccgtgctggactccgacggctccttcttcctcgtgagcaagctcaccgtggacaagagcaggtggcagcaggggaacgtcttctcatgctccgtgatgcatgaggctctgcacaaccactacacgcagaagagcctctccctgtctccgggtaaatag

SEQ ID NO: 147 - protein, 968 aa, Artificial Sequence
  Synthesized
QSALTQPASVSGSPGQSITISCTGTSSDVGGYNFVSWYQQHPGKAPKLMIYDVSDRPSGVSDRFSGSKSGNTASLIISGLQADDEADYYCSSYGSSSTHVIFGCGTKVTVLGGGGSGGGGSGGGGSGGGGSQVQLQESGGGLVKPGGSLRLSCAASGFTFSSYWMSWVRQAPGKCLEWVANINRDGSASYYVDSVKGRFTISRDDAKNSLYLQMNSLRAEDTAVYYCARDRGVGYFDLWGRGTLVTVSTGGGGSGGGGSDVVMTQSPSTLSASVGDRVTINCQASESISSWLAWYQQKPGKAPKLLIYEASKLASGVPSRFSGSGSGTEFTLTISSLQPDDFATYYCQGYFYFISRTYVNSFGGGTKVEIKRTVAAPSVFIFPPSDEQLKSGTASVVCLLNNFYPREAKVQWKVDNALQSGNSQESVTEQDSKDSTYSLSSTLTLSKADYEKHKVYACEVTHQGLSSPVTKSFNRGECGGDKTHTCPPCPAPEAAGGPSVFLFPPKPKDTLMISRTPEVTCVVVDVSHEDPEVKFNWYVDGVEVHNAKTKPREEQYASTYRVVSVLTVLHQDWLNGKEYKCAVSNKALPAPIEKTISKAKGQPREPQVYTLPPCRDELTKNQVSLWCLVKGFYPSDIAVEWESNGQPENNYKTTPPVLDSDGSFFLYSKLTVDKSRWQQGNVFSCSVMHEALHNHYTQKSLSLSPGGGGGSGGGGSEVQLLESGGGLVQPGGSLRLSCAASGFSFSSGYDMCWVRQAPGKCLEWIACIAAGSAGITYDANWAKGRFTISRDNSKNTLYLQMNSLRAEDTAVYYCARSAFSFDYAMDLWGQGTLVTVSSGGGGSGGGGSGGGGSGGGGSDIQMTQSPSTLSASVGDRVTITCQASQSISSHLNWYQQKPGKAPKLLIYKASTLASGVPSRFSGSGSGTEFTLTISSLQPDDFATYYCQQGYSWGNVDNVFGCGTKVEIK

SEQ ID NO: 148 - DNA, 2907 bp, Artificial Sequence
  Synthesized
cagtctgccctgactcagcctgcctccgtgtctgggtctcctggacagtcgatcaccatctcctgcactggaaccagcagtgacgttggtggttataactttgtctcctggtaccaacaacacccaggcaaagcccccaaactcatgatctatgatgtcagtgatcggccctcaggggtgtctgatcgcttctccggctccaagtctggcaacacggcctccctgatcatctctggcctccaggctgacgacgaggctgattattactgcagctcatatgggagcagcagcactcatgtgattttcggctgtgggaccaaggtgaccgtcctaggcggtggcggtagtgggggaggcggttctggcggcggagggtccggcggtggaggatcacaggtgcaattgcaggagtcggggggaggcctggtcaagcctggagggtccctgagactctcctgtgcagcctctggattcacctttagtagttattggatgagctgggtccgccaggctccagggaagtgcctggagtgggtggccaacataaaccgcgatggaagtgcgagttactatgtggactctgtgaagggccgattcaccatctccagagacgacgccaagaactcactgtatctgcaaatgaacagcctgagagctgaggacacggctgtgtattactgtgcgagagatcgtggggtgggctacttcgatctctggggccgtggcaccctggtcaccgtgtcgacaggcggtggagggtccggcggtggtggatcagacgtcgtgatgacccagtctccttccaccctgtctgcatctgtaggagacagagtcaccatcaattgccaagccagtgagagcattagcagttggttagcctggtatcagcagaaaccagggaaagcccctaagctcctgatctatgaagcatccaaactggcatctggggtcccatcaaggttcagcggcagtggatctgggacagaattcactctcaccatcagcagcctgcagcctgatgattttgcaacttattactgccaaggctatttttattttattagtcgtacttatgtaaattctttcggcggagggaccaaggtggagatcaaacgtacggtggctgcaccatctgtcttcatcttcccgccatctgatgagcagttgaaatctggaactgcctctgttgtgtgcctgctgaataacttctatcccagagaggccaaagtacagtggaaggtggataacgccctccaatcgggtaactcccaggagagtgtcacagagcaggacagcaaggacagcacctacagcctcagcagcaccctgacgctgagcaaagcagactacgagaaacacaaagtctacgcctgcgaagtcacccatcagggcctgagctcgcccgtcacaaagagcttcaacaggggagagtgtggaggcgacaaaactcacacatgcccaccgtgcccagcacctgaagccgcggggggaccgtcagtcttcctcttccccccaaaacccaaggacaccctcatgatctcccggacccctgaggtcacatgcgtggtggtggacgtgagccacgaagaccctgaggtcaagttcaactggtacgtggacggcgtggaggtgcataatgccaagacaaagccgcgggaggagcagtacgccagcacgtaccgtgtggtcagcgtcctcaccgtcctgcaccaggactggctgaatggcaaggagtacaagtgcgcggtctccaacaaagccctcccagcccccatcgagaaaaccatctccaaagccaaagggcagccccgagaaccacaggtgtacaccctgcccccatgtcgggatgagctgaccaagaaccaggtcagcctgtggtgcctggtcaaaggcttctatcccagcgacatcgccgtggagtgggagagcaatgggcagccggagaacaactacaagaccacgcctcccgtgctggactccgacggctccttcttcctctatagcaagctcaccgtggacaagagcaggtggcagcaggggaacgtcttctcatgctccgtgatgcatgaggctctgcacaaccactacacgcagaagagcctctccctgtctccgggtggcggtggagggtccggcggtggtggatccgaggtgcagctgttggagtctgggggaggcttggtacagcctggggggtccctgagactctcctgtgcagcctctggattctccttcagtagcgggtacgacatgtgctgggtccgccaggctccagggaagtgcctggagtggatcgcatgcattgctgctggtagtgctggtatcacttacgacgcgaactgggcgaaaggccggttcaccatctccagagacaattccaagaacacgctgtatctgcaaatgaacagcctgagagccgaggacacggccgtatattactgtgcgagatcggcgttttcgttcgactacgccatggacctctggggccagggaaccctggtcaccgtctcgtctggtggaggcggttcaggcggaggtggaagtggtggtggcggctctggaggcggcggatctgacatccagatgacccagtctccttccaccctgtctgcatctgtaggagacagagtcaccatcacttgccaggccagtcagagcattagttcccacttaaactggtatcagcagaaaccagggaaagcccctaagctcctgatctataaggcatccactctggcatctggggtcccatcaaggttcagcggcagtggatctgggacagaatttactctcaccatcagcagcctgcagcctgatgattttgcaacttattactgccaacagggttatagttggggtaatgttgataatgttttcggctgcgggaccaaggtggagatcaaatag

SEQ ID NO: 149 - protein, 961 aa, Artificial Sequence; identical to SEQ ID NO: 141
  Synthesized

SEQ ID NO: 150 - DNA, 2886 bp, Artificial Sequence; identical to SEQ ID NO: 142
  Synthesized

SEQ ID NO: 151 - protein, 968 aa, Artificial Sequence; identical to SEQ ID NO: 147
  Synthesized

SEQ ID NO: 152 - DNA, 2907 bp, Artificial Sequence; identical to SEQ ID NO: 148
  Synthesized

SEQ ID NO: 153 - protein, 468 aa, Artificial Sequence
  Synthesized
FLNSLFNQEVQIPLTESYCGPCPKNWICYKNNCYQFFDESKNWYESQASCMSQNASLLKVYSKEDQDLLKLVKSYHWMGLVHIPTNGSWQWEDGSILSPNLLTIIEMQKGDCALYASSFKGYIENCSTPNTYICMQRTVASTKGPSVFPLAPSSKSTSGGTAALGCLVKDYFPEPVTVSWNSGALTSGVHTFPAVLQSSGLYSLSSVVTVPSSSLGTQTYICNVNHKPSNTKVDKRVEPKSCDKTHTCPPCPAPEAAGGPSVFLFPPKPKDTLMISRTPEVTCVVVDVSHEDPEVKFNWYVDGVEVHNAKTKPREEQYASTYRVVSVLTVLHQDWLNGKEYKCAVSNKALPAPIEKTISKAKGQPREPQVCTLPPSRDELTKNQVSLSCAVKGFYPSDIAVEWESNGQPENNYKTTPPVLDSDGSFFLVSKLTVDKSRWQQGNVFSCSVMHEALHNHYTQKSLSLSPG

SEQ ID NO: 154 - DNA, 1407 bp, Artificial Sequence
  Synthesized
tttcttaattcccttttcaaccaagaggttcagatccccttgactgaaagctattgcggcccttgtccgaaaaactggatatgttacaagaataattgttaccaattcttcgacgaaagcaagaactggtatgagagtcaggcgtcttgtatgagtcagaatgccagcctgcttaaggtttattcaaaagaagaccaggatctgcttaagttggtaaagagctaccactggatggggctggtacatatcccaacgaatgggtcatggcagtgggaggacggttctattctgagtccaaatctcctgacgatcatcgaaatgcagaaaggggactgtgccctgtatgcatcatccttcaaggggtacatcgagaactgcagtaccccaaatacctacatttgtatgcaaagaacggttgctagcaccaagggcccatcggtcttccccctggcaccctcctccaagagcacctctgggggcacagcggccctgggctgcctggtcaaggactacttccccgaaccggtgacggtgtcgtggaactcaggcgccctgaccagcggcgtgcacaccttcccggctgtcctacagtcctcaggactctactccctcagcagcgtggtgaccgtgccctccagcagcttgggcacccagacctacatctgcaacgtgaatcacaagcccagcaacaccaaggtggacaagagagttgagcccaaatcttgtgacaaaactcacacatgcccaccgtgcccagcacctgaagccgcggggggaccgtcagtcttcctcttccccccaaaacccaaggacaccctcatgatctcccggacccctgaggtcacatgcgtggtggtggacgtgagccacgaagaccctgaggtcaagttcaactggtacgtggacggcgtggaggtgcataatgccaagacaaagccgcgggaggagcagtacgccagcacgtaccgtgtggtcagcgtcctcaccgtcctgcaccaggactggctgaatggcaaggagtacaagtgcgcggtctccaacaaagccctcccagcccccatcgagaaaaccatctccaaagccaaagggcagccccgagaaccacaggtgtgtaccctgcccccatcccgggatgagctgaccaagaaccaggtcagcctgtcctgcgccgtcaaaggcttctatcccagcgacatcgccgtggagtgggagagcaatgggcagccggagaacaactacaagaccacgcctcccgtgctggactccgacggctccttcttcctcgtgagcaagctcaccgtggacaagagcaggtggcagcaggggaacgtcttctcatgctccgtgatgcatgaggctctgcacaaccactacacgcagaagagcctctccctgtctccgggttaa

SEQ ID NO: 155 - protein, 474 aa, Artificial Sequence
  Synthesized
FLNSLFNQEVQIPLTESYCGPCPKNWICYKNNCYQFFDESKNWYESQASCMSQNASLLKVYSKEDQDLLKLVKSYHWMGLVHIPTNGSWQWEDGSILSPNLLTIIEMQKGDCALYASSFKGYIENCSTPNTYICMQRTVRTVAAPSVFIFPPSDEQLKSGTASVVCLLNNFYPREAKVQWKVDNALQSGNSQESVTEQDSKDSTYSLSSTLTLSKADYEKHKVYACEVTHQGLSSPVTKSFNRGECGGDKTHTCPPCPAPEAAGGPSVFLFPPKPKDTLMISRTPEVTCVVVDVSHEDPEVKFNWYVDGVEVHNAKTKPREEQYASTYRVVSVLTVLHQDWLNGKEYKCAVSNKALPAPIEKTISKAKGQPREPQVYTLPPCRDELTKNQVSLWCLVKGFYPSDIAVEWESNGQPENNYKTTPPVLDSDGSFFLYSKLTVDKSRWQQGNVFSCSVMHEALHNHYTQKSLSLSPG

SEQ ID NO: 156 - DNA, 1425 bp, Artificial Sequence
  Synthesized
ttcctaaactcattattcaaccaagaagttcaaattcccttgaccgaaagttactgtggcccatgtcctaaaaactggatatgttacaaaaataactgctaccaattttttgatgagagtaaaaactggtatgagagccaggcttcttgtatgtctcaaaatgccagccttctgaaagtatacagcaaagaggaccaggatttacttaaactggtgaagtcatatcattggatgggactagtacacattccaacaaatggatcttggcagtgggaagatggctccattctctcacccaacctactaacaataattgaaatgcagaagggagactgtgcactctatgcctcgagctttaaaggctatatagaaaactgttcaactccaaatacgtacatctgcatgcaaaggactgtgcgtacggtggctgcaccatctgtcttcatcttcccgccatctgatgagcagttgaaatctggaactgcctctgttgtgtgcctgctgaataacttctatcccagagaggccaaagtacagtggaaggtggataacgccctccaatcgggtaactcccaggagagtgtcacagagcaggacagcaaggacagcacctacagcctcagcagcaccctgacgctgagcaaagcagactacgagaaacacaaagtctacgcctgcgaagtcacccatcagggcctgagctcgcccgtcacaaagagcttcaacaggggagagtgtggaggcgacaaaactcacacatgcccaccgtgcccagcacctgaagccgcggggggaccgtcagtcttcctcttccccccaaaacccaaggacaccctcatgatctcccggacccctgaggtcacatgcgtggtggtggacgtgagccacgaagaccctgaggtcaagttcaactggtacgtggacggcgtggaggtgcataatgccaagacaaagccgcgggaggagcagtacgccagcacgtaccgtgtggtcagcgtcctcaccgtcctgcaccaggactggctgaatggcaaggagtacaagtgcgcggtctccaacaaagccctcccagcccccatcgagaaaaccatctccaaagccaaagggcagccccgagaaccacaggtgtacaccctgcccccatgtcgggatgagctgaccaagaaccaggtcagcctgtggtgcctggtcaaaggcttctatcccagcgacatcgccgtggagtgggagagcaatgggcagccggagaacaactacaagaccacgcctcccgtgctggactccgacggctccttcttcctctatagcaagctcaccgtggacaagagcaggtggcagcaggggaacgtcttctcatgctccgtgatgcatgaggctctgcacaaccactacacgcagaagagcctctccctgtctccgggttaa

SEQ ID NO: 157 - protein, 728 aa, Artificial Sequence
  Synthesized
EIVMTQSPSTLSASVGDRVIITCQASESISSWLAWYQQKPGKAPKLLIYEASKLASGVPSRFSGSGSGAEFTLTISSLQPDDFATYYCQGYFYFISRTYVNSFGCGTKLTVLGSTGSGSKPGSGEGSTKGEVQLVESGGGLVQPGGSLRLSCTASGFTISTNAMSWVRQAPGKCLEWVGVITGRDITYYASWAKGRFTISRDTSKNTVYLQMNSLRAEDTAVYYCARDGGSSAITSNNIWGQGTLVTVSTGGGGSGGGGSFLNSLFNQEVQIPLTESYCGPCPKNWICYKNNCYQFFDESKNWYESQASCMSQNASLLKVYSKEDQDLLKLVKSYHWMGLVHIPTNGSWQWEDGSILSPNLLTIIEMQKGDCALYASSFKGYIENCSTPNTYICMQRTVASTKGPSVFPLAPSSKSTSGGTAALGCLVKDYFPEPVTVSWNSGALTSGVHTFPAVLQSSGLYSLSSVVTVPSSSLGTQTYICNVNHKPSNTKVDKRVEPKSCDKTHTCPPCPAPEAAGGPSVFLFPPKPKDTLMISRTPEVTCVVVDVSHEDPEVKFNWYVDGVEVHNAKTKPREEQYASTYRVVSVLTVLHQDWLNGKEYKCAVSNKALPAPIEKTISKAKGQPREPQVCTLPPSRDELTKNQVSLSCAVKGFYPSDIAVEWESNGQPENNYKTTPPVLDSDGSFFLVSKLTVDKSRWQQGNVFSCSVMHEALHNHYTQKSLSLSPG

SEQ ID NO: 158 - DNA, 2187 bp, Artificial Sequence
  Synthesized
gagatcgtgatgacacaatctccatctacgctctccgcctcagtgggcgatagagtaattattacttgtcaagcctcagagagcatttcatcatggctcgcctggtatcagcaaaagcctgggaaggcccccaaacttctcatctatgaagcatcaaagctggcctctggggttccgtctcgcttctccgggtccggcagtggtgcagagtttacgttgactatatcttctttgcaacctgacgatttcgcaacatattattgccagggatacttttattttatttcccgaacatatgttaactcttttgggtgcgggaccaaactcactgtgctggggtctaccggtagtggttctaagcctggttcaggcgaaggcagtacgaaaggggaagtgcaactggtcgaaagcggtggagggcttgttcaacctggaggaagcctccgcttgtcctgcacggctagcggctttacaataagtacgaacgccatgagctgggtccggcaggctccaggtaagtgtctcgaatgggtgggggtcataacaggcagggacattacctactacgccagttgggccaagggtcgatttaccatttctagagatacatccaagaacacggtgtacctccagatgaattctcttagggcggaagacacagcagtatactactgcgcgcgagatggcgggagcagtgcgatcacatccaacaacatctggggtcagggcactcttgtcacggtgtcgactggcggtggagggtccggcggtggtggatcatttcttaattcccttttcaaccaagaggttcagatccccttgactgaaagctattgcggcccttgtccgaaaaactggatatgttacaagaataattgttaccaattcttcgacgaaagcaagaactggtatgagagtcaggcgtcttgtatgagtcagaatgccagcctgcttaaggtttattcaaaagaagaccaggatctgcttaagttggtaaagagctaccactggatggggctggtacatatcccaacgaatgggtcatggcagtgggaggacggttctattctgagtccaaatctcctgacgatcatcgaaatgcagaaaggggactgtgccctgtatgcatcatccttcaaggggtacatcgagaactgcagtaccccaaatacctacatttgtatgcaaagaacggttgctagcaccaagggcccatcggtcttccccctggcaccctcctccaagagcacctctgggggcacagcggccctgggctgcctggtcaaggactacttccccgaaccggtgacggtgtcgtggaactcaggcgccctgaccagcggcgtgcacaccttcccggctgtcctacagtcctcaggactctactccctcagcagcgtggtgaccgtgccctccagcagcttgggcacccagacctacatctgcaacgtgaatcacaagcccagcaacaccaaggtggacaagagagttgagcccaaatcttgtgacaaaactcacacatgcccaccgtgcccagcacctgaagccgcggggggaccgtcagtcttcctcttccccccaaaacccaaggacaccctcatgatctcccggacccctgaggtcacatgcgtggtggtggacgtgagccacgaagaccctgaggtcaagttcaactggtacgtggacggcgtggaggtgcataatgccaagacaaagccgcgggaggagcagtacgccagcacgtaccgtgtggtcagcgtcctcaccgtcctgcaccaggactggctgaatggcaaggagtacaagtgcgcggtctccaacaaagccctcccagcccccatcgagaaaaccatctccaaagccaaagggcagccccgagaaccacaggtgtgtaccctgcccccatcccgggatgagctgaccaagaaccaggtcagcctgtcctgcgccgtcaaaggcttctatcccagcgacatcgccgtggagtgggagagcaatgggcagccggagaacaactacaagaccacgcctcccgtgctggactccgacggctccttcttcctcgtgagcaagctcaccgtggacaagagcaggtggcagcaggggaacgtcttctcatgctccgtgatgcatgaggctctgcacaaccactacacgcagaagagcctctccctgtctccgggttaa

SEQ ID NO: 159 - protein, 474 aa, Artificial Sequence; identical to SEQ ID NO: 155
  Synthesized

SEQ ID NO: 160 - DNA, 1425 bp, Artificial Sequence; identical to SEQ ID NO: 156
  Synthesized

SEQ ID NO: 161 - protein, 728 aa, Artificial Sequence; identical to SEQ ID NO: 157
  Synthesized

SEQ ID NO: 162 - DNA, 2187 bp, Artificial Sequence; identical to SEQ ID NO: 158
  Synthesized

SEQ ID NO: 163 - protein, 728 aa, Artificial Sequence
  Synthesized
ENVLTQSPASLSASPGERVTITCSASSSVSYMHWYQQKPGQAPKLWIYDTSKLASGVPSRFSGSGSGNDHTLTISSMEPEDFATYYCFQGSVYPFTFGQGTKLEIKGSTGSGSKPGSGEGSTKGQVTLKESGPGLVQPGQTLRLTCAFSGFSLSTSGMGVGWIRQPPGKGLEWLAHIWWDDDKRYNPALKSRLTISKDTSKNQVYLQMNSLDAEDTAVYYCARMELWSYYFDYWGQGTLVTVSTGGGGSGGGGSFLNSLFNQEVQIPLTESYCGPCPKNWICYKNNCYQFFDESKNWYESQASCMSQNASLLKVYSKEDQDLLKLVKSYHWMGLVHIPTNGSWQWEDGSILSPNLLTIIEMQKGDCALYASSFKGYIENCSTPNTYICMQRTVRTVAAPSVFIFPPSDEQLKSGTASVVCLLNNFYPREAKVQWKVDNALQSGNSQESVTEQDSKDSTYSLSSTLTLSKADYEKHKVYACEVTHQGLSSPVTKSFNRGECGGDKTHTCPPCPAPEAAGGPSVFLFPPKPKDTLMISRTPEVTCVVVDVSHEDPEVKFNWYVDGVEVHNAKTKPREEQYASTYRVVSVLTVLHQDWLNGKEYKCAVSNKALPAPIEKTISKAKGQPREPQVYTLPPCRDELTKNQVSLWCLVKGFYPSDIAVEWESNGQPENNYKTTPPVLDSDGSFFLYSKLTVDKSRWQQGNVFSCSVMHEALHNHYTQKSLSLSPG

SEQ ID NO: 164 - DNA, 2187 bp, Artificial Sequence
  Synthesized
gaaaatgtattgacacagagccccgcctccctcagtgcctcacctggggaaagggtaactatcacttgctctgcatcaagcagcgtctcatacatgcattggtatcaacaaaagcctggacaggcccccaagctctggatatacgatacgagcaagctggcttccggcgtacctagccgcttcagtggttccggctcaggcaacgatcacacccttacgatttccagtatggaacccgaagattttgcaacttattattgtttccaggggagcgtgtacccattcactttcgggcaggggacaaaattggagataaagggaagtactggttctgggtctaaacccggttccggcgaaggtagtactaaaggacaggtcacattgaaggaatctggccccggccttgttcagccaggacagacccttaggctcacctgtgccttcagtggtttttctcttagcactagcggtatgggggtcggctggattcggcagcctcccggcaaaggtcttgagtggttggctcacatttggtgggacgacgacaaacggtataatcctgccttgaaaagtcggctgaccattagtaaggatacctcaaaaaatcaagtgtacttgcaaatgaatagccttgacgccgaggatacggctgtatattattgcgcgcggatggaactctggtcttactactttgattattgggggcaggggactctcgtcacggtgtcgactggcggtggagggtccggcggtggtggatcattcctaaactcattattcaaccaagaagttcaaattcccttgaccgaaagttactgtggcccatgtcctaaaaactggatatgttacaaaaataactgctaccaattttttgatgagagtaaaaactggtatgagagccaggcttcttgtatgtctcaaaatgccagccttctgaaagtatacagcaaagaggaccaggatttacttaaactggtgaagtcatatcattggatgggactagtacacattccaacaaatggatcttggcagtgggaagatggctccattctctcacccaacctactaacaataattgaaatgcagaagggagactgtgcactctatgcctcgagctttaaaggctatatagaaaactgttcaactccaaatacgtacatctgcatgcaaaggactgtgcgtacggtggctgcaccatctgtcttcatcttcccgccatctgatgagcagttgaaatctggaactgcctctgttgtgtgcctgctgaataacttctatcccagagaggccaaagtacagtggaaggtggataacgccctccaatcgggtaactcccaggagagtgtcacagagcaggacagcaaggacagcacctacagcctcagcagcaccctgacgctgagcaaagcagactacgagaaacacaaagtctacgcctgcgaagtcacccatcagggcctgagctcgcccgtcacaaagagcttcaacaggggagagtgtggaggcgacaaaactcacacatgcccaccgtgcccagcacctgaagccgcggggggaccgtcagtcttcctcttccccccaaaacccaaggacaccctcatgatctcccggacccctgaggtcacatgcgtggtggtggacgtgagccacgaagaccctgaggtcaagttcaactggtacgtggacggcgtggaggtgcataatgccaagacaaagccgcgggaggagcagtacgccagcacgtaccgtgtggtcagcgtcctcaccgtcctgcaccaggactggctgaatggcaaggagtacaagtgcgcggtctccaacaaagccctcccagcccccatcgagaaaaccatctccaaagccaaagggcagccccgagaaccacaggtgtacaccctgcccccatgtcgggatgagctgaccaagaaccaggtcagcctgtggtgcctggtcaaaggcttctatcccagcgacatcgccgtggagtgggagagcaatgggcagccggagaacaactacaagaccacgcctcccgtgctggactccgacggctccttcttcctctatagcaagctcaccgtggacaagagcaggtggcagcaggggaacgtcttctcatgctccgtgatgcatgaggctctgcacaaccactacacgcagaagagcctctccctgtctccgggttaa

SEQ ID NO: 165 - protein, 728 aa, Artificial Sequence; identical to SEQ ID NO: 157
  Synthesized

SEQ ID NO: 166 - DNA, 2187 bp, Artificial Sequence; identical to SEQ ID NO: 158
  Synthesized

SEQ ID NO: 167 - protein, 990 aa, Artificial Sequence
  Synthesized
ENVLTQSPASLSASPGERVTITCSASSSVSYMHWYQQKPGQAPKLWIYDTSKLASGVPSRFSGSGSGNDHTLTISSMEPEDFATYYCFQGSVYPFTFGQGTKLEIKGSTGSGSKPGSGEGSTKGQVTLKESGPGLVQPGQTLRLTCAFSGFSLSTSGMGVGWIRQPPGKGLEWLAHIWWDDDKRYNPALKSRLTISKDTSKNQVYLQMNSLDAEDTAVYYCARMELWSYYFDYWGQGTLVTVSTGGGGSGGGGSFLNSLFNQEVQIPLTESYCGPCPKNWICYKNNCYQFFDESKNWYESQASCMSQNASLLKVYSKEDQDLLKLVKSYHWMGLVHIPTNGSWQWEDGSILSPNLLTIIEMQKGDCALYASSFKGYIENCSTPNTYICMQRTVRTVAAPSVFIFPPSDEQLKSGTASVVCLLNNFYPREAKVQWKVDNALQSGNSQESVTEQDSKDSTYSLSSTLTLSKADYEKHKVYACEVTHQGLSSPVTKSFNRGECGGDKTHTCPPCPAPEAAGGPSVFLFPPKPKDTLMISRTPEVTCVVVDVSHEDPEVKFNWYVDGVEVHNAKTKPREEQYASTYRVVSVLTVLHQDWLNGKEYKCAVSNKALPAPIEKTISKAKGQPREPQVYTLPPCRDELTKNQVSLWCLVKGFYPSDIAVEWESNGQPENNYKTTPPVLDSDGSFFLYSKLTVDKSRWQQGNVFSCSVMHEALHNHYTQKSLSLSPGGGGGSGGGGSEVQLLESGGGLVQPGGSLRLSCAASGFSFSSGYDMCWVRQAPGKCLEWIACIAAGSAGITYDANWAKGRFTISRDNSKNTLYLQMNSLRAEDTAVYYCARSAFSFDYAMDLWGQGTLVTVSSGGGGSGGGGSGGGGSGGGGSDIQMTQSPSTLSASVGDRVTITCQASQSISSHLNWYQQKPGKAPKLLIYKASTLASGVPSRFSGSGSGTEFTLTISSLQPDDFATYYCQQGYSWGNVDNVFGCGTKVEIK

SEQ ID NO: 168 - DNA, 2973 bp, Artificial Sequence
  Synthesized
gaaaatgtattgacacagagccccgcctccctcagtgcctcacctggggaaagggtaactatcacttgctctgcatcaagcagcgtctcatacatgcattggtatcaacaaaagcctggacaggcccccaagctctggatatacgatacgagcaagctggcttccggcgtacctagccgcttcagtggttccggctcaggcaacgatcacacccttacgatttccagtatggaacccgaagattttgcaacttattattgtttccaggggagcgtgtacccattcactttcgggcaggggacaaaattggagataaagggaagtactggttctgggtctaaacccggttccggcgaaggtagtactaaaggacaggtcacattgaaggaatctggccccggccttgttcagccaggacagacccttaggctcacctgtgccttcagtggtttttctcttagcactagcggtatgggggtcggctggattcggcagcctcccggcaaaggtcttgagtggttggctcacatttggtgggacgacgacaaacggtataatcctgccttgaaaagtcggctgaccattagtaaggatacctcaaaaaatcaagtgtacttgcaaatgaatagccttgacgccgaggatacggctgtatattattgcgcgcggatggaactctggtcttactactttgattattgggggcaggggactctcgtcacggtgtcgactggcggtggagggtccggcggtggtggatcattcctaaactcattattcaaccaagaagttcaaattcccttgaccgaaagttactgtggcccatgtcctaaaaactggatatgttacaaaaataactgctaccaattttttgatgagagtaaaaactggtatgagagccaggcttcttgtatgtctcaaaatgccagccttctgaaagtatacagcaaagaggaccaggatttacttaaactggtgaagtcatatcattggatgggactagtacacattccaacaaatggatcttggcagtgggaagatggctccattctctcacccaacctactaacaataattgaaatgcagaagggagactgtgcactctatgcctcgagctttaaaggctatatagaaaactgttcaactccaaatacgtacatctgcatgcaaaggactgtgcgtacggtggctgcaccatctgtcttcatcttcccgccatctgatgagcagttgaaatctggaactgcctctgttgtgtgcctgctgaataacttctatcccagagaggccaaagtacagtggaaggtggataacgccctccaatcgggtaactcccaggagagtgtcacagagcaggacagcaaggacagcacctacagcctcagcagcaccctgacgctgagcaaagcagactacgagaaacacaaagtctacgcctgcgaagtcacccatcagggcctgagctcgcccgtcacaaagagcttcaacaggggagagtgtggaggcgacaaaactcacacatgcccaccgtgcccagcacctgaagccgcggggggaccgtcagtcttcctcttccccccaaaacccaaggacaccctcatgatctcccggacccctgaggtcacatgcgtggtggtggacgtgagccacgaagaccctgaggtcaagttcaactggtacgtggacggcgtggaggtgcataatgccaagacaaagccgcgggaggagcagtacgccagcacgtaccgtgtggtcagcgtcctcaccgtcctgcaccaggactggctgaatggcaaggagtacaagtgcgcggtctccaacaaagccctcccagcccccatcgagaaaaccatctccaaagccaaagggcagccccgagaaccacaggtgtacaccctgcccccatgtcgggatgagctgaccaagaaccaggtcagcctgtggtgcctggtcaaaggcttctatcccagcgacatcgccgtggagtgggagagcaatgggcagccggagaacaactacaagaccacgcctcccgtgctggactccgacggctccttcttcctctatagcaagctcaccgtggacaagagcaggtggcagcaggggaacgtcttctcatgctccgtgatgcatgaggctctgcacaaccactacacgcagaagagcctctccctgtctccgggtggcggtggagggtccggcggtggtggatccgaggtgcagctgttggagtctgggggaggcttggtacagcctggggggtccctgagactctcctgtgcagcctctggattctccttcagtagcgggtacgacatgtgctgggtccgccaggctccagggaagtgcctggagtggatcgcatgcattgctgctggtagtgctggtatcacttacgacgcgaactgggcgaaaggccggttcaccatctccagagacaattccaagaacacgctgtatctgcaaatgaacagcctgagagccgaggacacggccgtatattactgtgcgagatcggcgttttcgttcgactacgccatggacctctggggccagggaaccctggtcaccgtctcgtctggtggaggcggttcaggcggaggtggaagtggtggtggcggctctggaggcggcggatctgacatccagatgacccagtctccttccaccctgtctgcatctgtaggagacagagtcaccatcacttgccaggccagtcagagcattagttcccacttaaactggtatcagcagaaaccagggaaagcccctaagctcctgatctataaggcatccactctggcatctggggtcccatcaaggttcagcggcagtggatctgggacagaatttactctcaccatcagcagcctgcagcctgatgattttgcaacttattactgccaacagggttatagttggggtaatgttgataatgttttcggctgcgggaccaaggtggagatcaaatag

SEQ ID NO: 169 - protein, 984 aa, Artificial Sequence
  Synthesized
EIVMTQSPSTLSASVGDRVIITCQASESISSWLAWYQQKPGKAPKLLIYEASKLASGVPSRFSGSGSGAEFTLTISSLQPDDFATYYCQGYFYFISRTYVNSFGCGTKLTVLGSTGSGSKPGSGEGSTKGEVQLVESGGGLVQPGGSLRLSCTASGFTISTNAMSWVRQAPGKCLEWVGVITGRDITYYASWAKGRFTISRDTSKNTVYLQMNSLRAEDTAVYYCARDGGSSAITSNNIWGQGTLVTVSTGGGGSGGGGSFLNSLFNQEVQIPLTESYCGPCPKNWICYKNNCYQFFDESKNWYESQASCMSQNASLLKVYSKEDQDLLKLVKSYHWMGLVHIPTNGSWQWEDGSILSPNLLTIIEMQKGDCALYASSFKGYIENCSTPNTYICMQRTVASTKGPSVFPLAPSSKSTSGGTAALGCLVKDYFPEPVTVSWNSGALTSGVHTFPAVLQSSGLYSLSSVVTVPSSSLGTQTYICNVNHKPSNTKVDKRVEPKSCDKTHTCPPCPAPEAAGGPSVFLFPPKPKDTLMISRTPEVTCVVVDVSHEDPEVKFNWYVDGVEVHNAKTKPREEQYASTYRVVSVLTVLHQDWLNGKEYKCAVSNKALPAPIEKTISKAKGQPREPQVCTLPPSRDELTKNQVSLSCAVKGFYPSDIAVEWESNGQPENNYKTTPPVLDSDGSFFLVSKLTVDKSRWQQGNVFSCSVMHEALHNHYTQKSLSLSPGGGGGSGGGGSRSLVESGGGLVQPGGSLRLSCTASGFTISSYHMQWVRQAPGKCLEYIGTISSGGNVYYASSARGRFTISRPSSKNTVDLQMNSLRAEDTAVYYCARDSGYSDPMWGQGTLVTVSSGGGGSGGGGSGGGGSGGGGSDVVMTQSPSSVSASVGDRVTITCQASQNIRTYLSWYQQKPGKAPKLLIYAAANLASGVPSRFSGSGSGTDFTLTISDLEPGDAATYYCQSTYLGTDYVGGAFGCGTKVEIK

SEQ ID NO: 170 - DNA, 2955 bp, Artificial Sequence
  Synthesized
gagatcgtgatgacacaatctccatctacgctctccgcctcagtgggcgatagagtaattattacttgtcaagcctcagagagcatttcatcatggctcgcctggtatcagcaaaagcctgggaaggcccccaaacttctcatctatgaagcatcaaagctggcctctggggttccgtctcgcttctccgggtccggcagtggtgcagagtttacgttgactatatcttctttgcaacctgacgatttcgcaacatattattgccagggatacttttattttatttcccgaacatatgttaactcttttgggtgcgggaccaaactcactgtgctggggtctaccggtagtggttctaagcctggttcaggcgaaggcagtacgaaaggggaagtgcaactggtcgaaagcggtggagggcttgttcaacctggaggaagcctccgcttgtcctgcacggctagcggctttacaataagtacgaacgccatgagctgggtccggcaggctccaggtaagtgtctcgaatgggtgggggtcataacaggcagggacattacctactacgccagttgggccaagggtcgatttaccatttctagagatacatccaagaacacggtgtacctccagatgaattctcttagggcggaagacacagcagtatactactgcgcgcgagatggcgggagcagtgcgatcacatccaacaacatctggggtcagggcactcttgtcacggtgtcgactggcggtggagggtccggcggtggtggatcatttcttaattcccttttcaaccaagaggttcagatccccttgactgaaagctattgcggcccttgtccgaaaaactggatatgttacaagaataattgttaccaattcttcgacgaaagcaagaactggtatgagagtcaggcgtcttgtatgagtcagaatgccagcctgcttaaggtttattcaaaagaagaccaggatctgcttaagttggtaaagagctaccactggatggggctggtacatatcccaacgaatgggtcatggcagtgggaggacggttctattctgagtccaaatctcctgacgatcatcgaaatgcagaaaggggactgtgccctgtatgcatcatccttcaaggggtacatcgagaactgcagtaccccaaatacctacatttgtatgcaaagaacggttgctagcaccaagggcccatcggtcttccccctggcaccctcctccaagagcacctctgggggcacagcggccctgggctgcctggtcaaggactacttccccgaaccggtgacggtgtcgtggaactcaggcgccctgaccagcggcgtgcacaccttcccggctgtcctacagtcctcaggactctactccctcagcagcgtggtgaccgtgccctccagcagcttgggcacccagacctacatctgcaacgtgaatcacaagcccagcaacaccaaggtggacaagagagttgagcccaaatcttgtgacaaaactcacacatgcccaccgtgcccagcacctgaagccgcggggggaccgtcagtcttcctcttccccccaaaacccaaggacaccctcatgatctcccggacccctgaggtcacatgcgtggtggtggacgtgagccacgaagaccctgaggtcaagttcaactggtacgtggacggcgtggaggtgcataatgccaagacaaagccgcgggaggagcagtacgccagcacgtaccgtgtggtcagcgtcctcaccgtcctgcaccaggactggctgaatggcaaggagtacaagtgcgcggtctccaacaaagccctcccagcccccatcgagaaaaccatctccaaagccaaagggcagccccgagaaccacaggtgtgtaccctgcccccatcccgggatgagctgaccaagaaccaggtcagcctgtcctgcgccgtcaaaggcttctatcccagcgacatcgccgtggagtgggagagcaatgggcagccggagaacaactacaagaccacgcctcccgtgctggactccgacggctccttcttcctcgtgagcaagctcaccgtggacaagagcaggtggcagcaggggaacgtcttctcatgctccgtgatgcatgaggctctgcacaaccactacacgcagaagagcctctccctgtctccgggtggcggtggagggtccggcggtggtggatcccggtcgctggtggagtctgggggaggcttggtccagcctggggggtccctgagactctcctgtactgcctctggattcaccatcagtagctaccacatgcagtgggtccggcaggcacctgggaagtgcctggagtacatcggaaccattagtagtggtggtaatgtatactacgcaagctccgctagaggcagattcaccatctccagaccctcgtccaagaacacggtggatcttcaaatgaacagcctgagagccgaggacacggctgtgtattactgtgcgagagactctggttatagtgatcctatgtggggccagggaaccctggtcaccgtctcttcaggcggtggcggtagtgggggaggcggttctggcggcggagggtccggcggtggaggatcagacgttgtgatgacccagtctccatcttccgtgtctgcatctgtaggagacagagtcaccatcacctgtcaggccagtcagaacattaggacttacttatcctggtatcagcagaaaccagggaaagcccctaagctcctgatctatgctgcagccaatctggcatctggggtcccatcaaggttcagcggcagtggatctgggacagatttcactctcaccatcagcgacttggaacctggcgatgctgcaacttactattgtcagtctacctatcttggtactgattatgttggcggtgctttcggctgtgggaccaaggtggagatcaaatga

SEQ ID NO: 171 - protein, 990 aa, Artificial Sequence; identical to SEQ ID NO: 167
  Synthesized

SEQ ID NO: 172 - DNA, 2973 bp, Artificial Sequence; identical to SEQ ID NO: 168
  Synthesized

SEQ ID NO: 173 - protein, 1015 aa, Artificial Sequence
  Synthesized
FLNSLFNQEVQIPLTESYCGPCPKNWICYKNNCYQFFDESKNWYESQASCMSQNASLLKVYSKEDQDLLKLVKSYHWMGLVHIPTNGSWQWEDGSILSPNLLTIIEMQKGDCALYASSFKGYIENCSTPNTYICMQRTVGGGGSGGGGSGGGGSGGGGSFLNSLFNQEVQIPLTESYCGPCPKNWICYKNNCYQFFDESKNWYESQASCMSQNASLLKVYSKEDQDLLKLVKSYHWMGLVHIPTNGSWQWEDGSILSPNLLTIIEMQKGDCALYASSFKGYIENCSTPNTYICMQRTVVDGGGGSGGGGSEVQLVESGGGLVQPGGSLRLSCAASGFTISTNAMSWVRQAPGKGLEWIGVITGRDITYYASWAKGRFTISRDNSKNTLYLQMNSLRAEDTAVYYCARDGGSSAITSNNIWGQGTLVTVSSASTKGPSVFPLAPSSKSTSGGTAALGCLVKDYFPEPVTVSWNSGALTSGVHTFPAVLQSSGLYSLSSVVTVPSSSLGTQTYICNVNHKPSNTKVDKRVEPKSCDKTHTCPPCPAPEAAGGPSVFLFPPKPKDTLMISRTPEVTCVVVDVSHEDPEVKFNWYVDGVEVHNAKTKPREEQYASTYRVVSVLTVLHQDWLNGKEYKCAVSNKALPAPIEKTISKAKGQPREPQVCTLPPSRDELTKNQVSLSCAVKGFYPSDIAVEWESNGQPENNYKTTPPVLDSDGSFFLVSKLTVDKSRWQQGNVFSCSVMHEALHNHYTQKSLSLSPGGGGGSGGGGSRSLVESGGGLVQPGGSLRLSCTASGFTISSYHMQWVRQAPGKCLEYIGTISSGGNVYYASSARGRFTISRPSSKNTVDLQMNSLRAEDTAVYYCARDSGYSDPMWGQGTLVTVSSGGGGSGGGGSGGGGSGGGGSDVVMTQSPSSVSASVGDRVTITCQASQNIRTYLSWYQQKPGKAPKLLIYAAANLASGVPSRFSGSGSGTDFTLTISDLEPGDAATYYCQSTYLGTDYVGGAFGCGTKVEIK

SEQ ID NO: 174 - DNA, 3048 bp, Artificial Sequence
  Synthesized
tttcttaattcccttttcaaccaagaggttcagatccccttgactgaaagctattgcggcccttgtccgaaaaactggatatgttacaagaataattgttaccaattcttcgacgaaagcaagaactggtatgagagtcaggcgtcttgtatgagtcagaatgccagcctgcttaaggtttattcaaaagaagaccaggatctgcttaagttggtaaagagctaccactggatggggctggtacatatcccaacgaatgggtcatggcagtgggaggacggttctattctgagtccaaatctcctgacgatcatcgaaatgcagaaaggggactgtgccctgtatgcatcatccttcaaggggtacatcgagaactgcagtaccccaaatacctacatttgtatgcaaagaacggttggaggcggtggctcaggcggaggcggctcaggaggtggcggttcaggaggcggcggatctttcctaaactcattattcaaccaagaagttcaaattcccttgaccgaaagttactgtggcccatgtcctaaaaactggatatgttacaaaaataactgctaccaattttttgatgagagtaaaaactggtatgagagccaggcttcttgtatgtctcaaaatgccagccttctgaaagtatacagcaaagaggaccaggatttacttaaactggtgaagtcatatcattggatgggactagtacacattccaacaaatggatcttggcagtgggaagatggctccattctctcacccaacctactaacaataattgaaatgcagaagggagactgtgcactctatgcctcgagctttaaaggctatatagaaaactgttcaactccaaatacgtacatctgcatgcaaaggactgtggtcgacggcggtggagggtccggcggtggtggatcagaggtgcagctggtggagtctgggggaggcttggtccagcctggggggtccctgagactctcctgtgcagcctctggattcaccatcagtaccaatgcaatgagctgggtccgccaggctccagggaaggggctggagtggatcggagtcattactggtcgtgatatcacatactacgcgagctgggcgaaaggcagattcaccatctccagagacaattccaagaacacgctgtatcttcaaatgaacagcctgagagccgaggacacggctgtgtattactgtgcgagagacggtggttcttctgctattactagtaacaacatttggggccagggaaccctggtcaccgtgtcctcagctagcaccaagggcccatcggtcttccccctggcaccctcctccaagagcacctctgggggcacagcggccctgggctgcctggtcaaggactacttccccgaaccggtgacggtgtcgtggaactcaggcgccctgaccagcggcgtgcacaccttcccggctgtcctacagtcctcaggactctactccctcagcagcgtggtgaccgtgccctccagcagcttgggcacccagacctacatctgcaacgtgaatcacaagcccagcaacaccaaggtggacaagagagttgagcccaaatcttgtgacaaaactcacacatgcccaccgtgcccagcacctgaagccgcggggggaccgtcagtcttcctcttccccccaaaacccaaggacaccctcatgatctcccggacccctgaggtcacatgcgtggtggtggacgtgagccacgaagaccctgaggtcaagttcaactggtacgtggacggcgtggaggtgcataatgccaagacaaagccgcgggaggagcagtacgccagcacgtaccgtgtggtcagcgtcctcaccgtcctgcaccaggactggctgaatggcaaggagtacaagtgcgcggtctccaacaaagccctcccagcccccatcgagaaaaccatctccaaagccaaagggcagccccgagaaccacaggtgtgtaccctgcccccatcccgggatgagctgaccaagaaccaggtcagcctgtcctgcgccgtcaaaggcttctatcccagcgacatcgccgtggagtgggagagcaatgggcagccggagaacaactacaagaccacgcctcccgtgctggactccgacggctccttcttcctcgtgagcaagctcaccgtggacaagagcaggtggcagcaggggaacgtcttctcatgctccgtgatgcatgaggctctgcacaaccactacacgcagaagagcctctccctgtctccgggtggcggtggagggtccggcggtggtggatcccggtcgctggtggagtctgggggaggcttggtccagcctggggggtccctgagactctcctgtactgcctctggattcaccatcagtagctaccacatgcagtgggtccggcaggcacctgggaagtgcctggagtacatcggaaccattagtagtggtggtaatgtatactacgcaagctccgctagaggcagattcaccatctccagaccctcgtccaagaacacggtggatcttcaaatgaacagcctgagagccgaggacacggctgtgtattactgtgcgagagactctggttatagtgatcctatgtggggccagggaaccctggtcaccgtctcttcaggcggtggcggtagtgggggaggcggttctggcggcggagggtccggcggtggaggatcagacgttgtgatgacccagtctccatcttccgtgtctgcatctgtaggagacagagtcaccatcacctgtcaggccagtcagaacattaggacttacttatcctggtatcagcagaaaccagggaaagcccctaagctcctgatctatgctgcagccaatctggcatctggggtcccatcaaggttcagcggcagtggatctgggacagatttcactctcaccatcagcgacttggaacctggcgatgctgcaacttactattgtcagtctacctatcttggtactgattatgttggcggtgctttcggctgtgggaccaaggtggagatcaaatga

SEQ ID NO: 175 - protein, 965 aa, Artificial Sequence; identical to SEQ ID NO: 71
  Synthesized

SEQ ID NO: 176 - DNA, 2898 bp, Artificial Sequence; identical to SEQ ID NO: 72
  Synthesized

SEQ ID NO: 177 - protein, 1300 aa, Artificial Sequence
  Synthesized
EIVMTQSPSTLSASVGDRVIITCQASESISSWLAWYQQKPGKAPKLLIYEASKLASGVPSRFSGSGSGAEFTLTISSLQPDDFATYYCQGYFYFISRTYVNSFGCGTKLTVLGSTGSGSKPGSGEGSTKGEVQLVESGGGLVQPGGSLRLSCTASGFTISTNAMSWVRQAPGKCLEWVGVITGRDITYYASWAKGRFTISRDTSKNTVYLQMNSLRAEDTAVYYCARDGGSSAITSNNIWGQGTLVTVSTGGGGSGGGGSFLNSLFNQEVQIPLTESYCGPCPKNWICYKNNCYQFFDESKNWYESQASCMSQNASLLKVYSKEDQDLLKLVKSYHWMGLVHIPTNGSWQWEDGSILSPNLLTIIEMQKGDCALYASSFKGYIENCSTPNTYICMQRTVASTKGPSVFPLAPSSKSTSGGTAALGCLVKDYFPEPVTVSWNSGALTSGVHTFPAVLQSSGLYSLSSVVTVPSSSLGTQTYICNVNHKPSNTKVDKRVEPKSCDKTHTCPPCPAPEAAGGPSVFLFPPKPKDTLMISRTPEVTCVVVDVSHEDPEVKFNWYVDGVEVHNAKTKPREEQYASTYRVVSVLTVLHQDWLNGKEYKCAVSNKALPAPIEKTISKAKGQPREPQVCTLPPSRDELTKNQVSLSCAVKGFYPSDIAVEWESNGQPENNYKTTPPVLDSDGSFFLVSKLTVDKSRWQQGNVFSCSVMHEALHNHYTQKSLSLSPGGGGGSGGGGSREGPELSPDDPAGLLDLRQGMFAQLVAQNVLLIDGPLSWYSDPGLAGVSLTGGLSYKEDTKELVVAKAGVYYVFFQLELRRVVAGEGSGSVSLALHLQPLRSAAGAAALALTVDLPPASSEARNSAFGFQGRLLHLSAGQRLGVHLHTEARARHAWQLTQGATVLGLFRVTPEIPAGLGSTGSGSKPGSGEGSTKGREGPELSPDDPAGLLDLRQGMFAQLVAQNVLLIDGPLSWYSDPGLAGVSLTGGLSYKEDTKELVVAKAGVYYVFFQLELRRVVAGEGSGSVSLALHLQPLRSAAGAAALALTVDLPPASSEARNSAFGFQGRLLHLSAGQRLGVHLHTEARARHAWQLTQGATVLGLFRVTPEIPAGLGGGGSGGGGSREGPELSPDDPAGLLDLRQGMFAQLVAQNVLLIDGPLSWYSDPGLAGVSLTGGLSYKEDTKELVVAKAGVYYVFFQLELRRVVAGEGSGSVSLALHLQPLRSAAGAAALALTVDLPPASSEARNSAFGFQGRLLHLSAGQRLGVHLHTEARARHAWQLTQGATVLGLFRVTPEIPAGL

SEQ ID NO: 178 - DNA, 3903 bp, Artificial Sequence
  Synthesized
gagatcgtgatgacacaatctccatctacgctctccgcctcagtgggcgatagagtaattattacttgtcaagcctcagagagcatttcatcatggctcgcctggtatcagcaaaagcctgggaaggcccccaaacttctcatctatgaagcatcaaagctggcctctggggttccgtctcgcttctccgggtccggcagtggtgcagagtttacgttgactatatcttctttgcaacctgacgatttcgcaacatattattgccagggatacttttattttatttcccgaacatatgttaactcttttgggtgcgggaccaaactcactgtgctggggtctaccggtagtggttctaagcctggttcaggcgaaggcagtacgaaaggggaagtgcaactggtcgaaagcggtggagggcttgttcaacctggaggaagcctccgcttgtcctgcacggctagcggctttacaataagtacgaacgccatgagctgggtccggcaggctccaggtaagtgtctcgaatgggtgggggtcataacaggcagggacattacctactacgccagttgggccaagggtcgatttaccatttctagagatacatccaagaacacggtgtacctccagatgaattctcttagggcggaagacacagcagtatactactgcgcgcgagatggcgggagcagtgcgatcacatccaacaacatctggggtcagggcactcttgtcacggtgtcgactggcggtggagggtccggcggtggtggatcatttcttaattcccttttcaaccaagaggttcagatccccttgactgaaagctattgcggcccttgtccgaaaaactggatatgttacaagaataattgttaccaattcttcgacgaaagcaagaactggtatgagagtcaggcgtcttgtatgagtcagaatgccagcctgcttaaggtttattcaaaagaagaccaggatctgcttaagttggtaaagagctaccactggatggggctggtacatatcccaacgaatgggtcatggcagtgggaggacggttctattctgagtccaaatctcctgacgatcatcgaaatgcagaaaggggactgtgccctgtatgcatcatccttcaaggggtacatcgagaactgcagtaccccaaatacctacatttgtatgcaaagaacggttgctagcaccaagggcccatcggtcttccccctggcaccctcctccaagagcacctctgggggcacagcggccctgggctgcctggtcaaggactacttccccgaaccggtgacggtgtcgtggaactcaggcgccctgaccagcggcgtgcacaccttcccggctgtcctacagtcctcaggactctactccctcagcagcgtggtgaccgtgccctccagcagcttgggcacccagacctacatctgcaacgtgaatcacaagcccagcaacaccaaggtggacaagagagttgagcccaaatcttgtgacaaaactcacacatgcccaccgtgcccagcacctgaagccgcggggggaccgtcagtcttcctcttccccccaaaacccaaggacaccctcatgatctcccggacccctgaggtcacatgcgtggtggtggacgtgagccacgaagaccctgaggtcaagttcaactggtacgtggacggcgtggaggtgcataatgccaagacaaagccgcgggaggagcagtacgccagcacgtaccgtgtggtcagcgtcctcaccgtcctgcaccaggactggctgaatggcaaggagtacaagtgcgcggtctccaacaaagccctcccagcccccatcgagaaaaccatctccaaagccaaagggcagccccgagaaccacaggtgtgtaccctgcccccatcccgggatgagctgaccaagaaccaggtcagcctgtcctgcgccgtcaaaggcttctatcccagcgacatcgccgtggagtgggagagcaatgggcagccggagaacaactacaagaccacgcctcccgtgctggactccgacggctccttcttcctcgtgagcaagctcaccgtggacaagagcaggtggcagcaggggaacgtcttctcatgctccgtgatgcatgaggctctgcacaaccactacacgcagaagagcctctccctgtctccgggtggcggtggagggtccggcggtggtggatcccgagagggccccgagctgtctcctgatgacccagcaggcctcttggacttgcggcagggtatgttcgctcaacttgtggctcagaatgttctgctcattgatggaccactctcttggtatagtgaccccggtctggccggggtgagtctgaccggcgggctctcttataaagaggatactaaggaactggtcgtagcaaaagcgggcgtttattacgttttttttcagctggagctcaggcgcgtggtggccggcgagggcagtggctctgtgtccctggccctgcacttacagcccttgagaagcgctgcaggtgctgccgcactggctttaactgttgacctccctccggcctcttctgaagctagaaacagcgctttcggcttccaagggcgcctgctgcacctgagcgcaggccagcgcttaggtgtgcaccttcatacagaggccagggcccgacacgcttggcagctcacacagggtgccacggttctcggacttttccgcgttactcccgagatccccgctggcctcggaagtactggttctgggtctaaacccggttccggcgaaggtagtactaaaggacgagaagggccagagttaagtccagatgaccctgctgggcttttggacctgcggcagggcatgttcgctcaactggtggctcagaacgtgctgctgatcgatggccccctgagttggtacagcgatcccgggctggcaggcgtgtcacttacagggggcctctcttacaaggaagacaccaaggagttagtggtcgctaaggctggcgtgtattacgtgttcttccaactggagctgagaagggttgtggcaggagagggtagcggcagcgtgtctttagcccttcacttgcagcccctgaggtctgctgcaggtgcagccgctctcgcgctcaccgtggatctccccccagcctcatctgaagctaggaacagtgcatttggctttcagggacgcttgctgcacctctccgctggacagaggctgggcgtgcaccttcacacagaggcccgtgccaggcatgcatggcagctcactcagggggcaacagtgctgggtctcttccgcgtgactcctgaaataccagctggacttggcggtggaggcagcggcggaggaggatctcgtgaggggccagaactgtcccccgatgacccagccggactgctcgatctcagacagggcatgttcgctcagcttgtagcccaaaatgtcctcctgattgacggccctttgagctggtatagtgatcccggcttggccggggtatctctgaccggaggcctctcctacaaggaagacaccaaagagctggtggtggcaaaagcgggggtgtattatgtgttctttcagctcgagctgcggagagttgtggccggggaagggtctgggagcgtatctcttgcacttcacctgcagcccctgcgcagcgccgctggagccgccgcccttgctcttactgtggatctgcctcctgcttcctcagaagcacgcaacagcgccttcggctttcaaggacgtctcctgcacttgtccgcaggacagaggttgggcgtccatttacacactgaggcacgggcacggcacgcttggcagcttacccagggagccaccgtgctgggactctttagagtgacacccgagatccccgctggcttgtaa

SEQ ID NO: 179 - protein, 990 aa, Artificial Sequence; identical to SEQ ID NO: 167
  Synthesized

SEQ ID NO: 180 - DNA, 2973 bp, Artificial Sequence; identical to SEQ ID NO: 168
  Synthesized

SEQ ID NO: 181 - protein, 449 aa, Artificial Sequence
  Synthesized
QVQLQESGPGLVKPSETLSLTCTVSGGSVSSGDYYWTWIRQSPGKGLEWIGHIYYSGNTNYNPSLKSRLTISIDTSKTQFSLKLSSVTAADTAIYYCVRDRVTGAFDIWGQGTMVTVSSASTKGPSVFPLAPSSKSTSGGTAALGCLVKDYFPEPVTVSWNSGALTSGVHTFPAVLQSSGLYSLSSVVTVPSSSLGTQTYICNVNHKPSNTKVDKRVEPKSCDKTHTCPPCPAPELLGGPSVFLFPPKPKDTLMISRTPEVTCVVVDVSHEDPEVKFNWYVDGVEVHNAKTKPREEQYNSTYRVVSVLTVLHQDWLNGKEYKCKVSNKALPAPIEKTISKAKGQPREPQVYTLPPSREEMTKNQVSLTCLVKGFYPSDIAVEWESNGQPENNYKTTPPVLDSDGSFFLYSKLTVDKSRWQQGNVFSCSVMHEALHNHYTQKSLSLSPGK

SEQ ID NO: 182 - DNA, 1350 bp, Artificial Sequence
  Synthesized
caggtgcagctgcaggagtcgggcccaggactggtgaagccttcggagaccctgtccctcacctgcactgtctctggtggctccgtcagcagtggtgattactactggacctggatccggcagtccccagggaagggactggagtggattggacacatctattacagtgggaacaccaattataacccctccctcaagagccgactcaccatatcaattgacacgtccaagactcagttctccctgaagctgagttctgtgaccgctgcggacacggccatttattactgtgtgcgagatcgagtgactggtgcttttgatatctggggccaagggacaatggtcaccgtctcgagcgctagcaccaagggcccatcggtcttccccctggcaccctcctccaagagcacctctgggggcacagcggccctgggctgcctggtcaaggactacttccccgaaccggtgacggtgtcgtggaactcaggcgccctgaccagcggcgtgcacaccttcccggctgtcctacagtcctcaggactctactccctcagcagcgtggtgaccgtgccctccagcagcttgggcacccagacctacatctgcaacgtgaatcacaagcccagcaacaccaaggtggacaagagagttgagcccaaatcttgtgacaaaactcacacatgcccaccgtgcccagcacctgaactcctggggggaccgtcagtcttcctcttccccccaaaacccaaggacaccctcatgatctcccggacccctgaggtcacatgcgtggtggtggacgtgagccacgaagaccctgaggtcaagttcaactggtacgtggacggcgtggaggtgcataatgccaagacaaagccgcgggaggagcagtacaacagcacgtaccgtgtggtcagcgtcctcaccgtcctgcaccaggactggctgaatggcaaggagtacaagtgcaaggtctccaacaaagccctcccagcccccatcgagaaaaccatctccaaagccaaagggcagccccgagaaccacaggtgtacaccctgcccccatcccgggaggagatgaccaagaaccaggtcagcctgacctgcctggtcaaaggcttctatcccagcgacatcgccgtggagtgggagagcaatgggcagccggagaacaactacaagaccacgcctcccgtgctggactccgacggctccttcttcctctatagcaagctcaccgtggacaagagcaggtggcagcaggggaacgtcttctcatgctccgtgatgcatgaggctctgcacaaccactacacgcagaagagcctctccctgtctccgggtaaatga

SEQ ID NO: 183 - protein, 214 aa, Artificial Sequence
  Synthesized
DIQMTQSPSSLSASVGDRVTITCQASQDISNYLNWYQQKPGKAPKLLIYDASNLETGVPSRFSGSGSGTDFTFTISSLQPEDIATYFCQHFDHLPLAFGGGTKVEIKRTVAAPSVFIFPPSDEQLKSGTASVVCLLNNFYPREAKVQWKVDNALQSGNSQESVTEQDSKDSTYSLSSTLTLSKADYEKHKVYACEVTHQGLSSPVTKSFNRGEC

SEQ ID NO: 184 - DNA, 645 bp, Artificial Sequence
  Synthesized
gacatccagatgacccagtctccatcctccctgtctgcatctgtaggagacagagtcaccatcacttgccaggcgagtcaggacatcagcaactatttaaattggtatcagcagaaaccagggaaagcccctaaactcctgatctacgatgcatccaatttggaaacaggggtcccatcaaggttcagtggaagtggatctgggacagattttactttcaccatcagcagcctgcagcctgaagatattgcaacatatttctgtcaacactttgatcatctcccgctcgctttcggcggagggaccaaggtggaaattaaacgtacggtggctgcaccatctgtcttcatcttcccgccatctgatgagcagttgaaatctggaactgcctctgttgtgtgcctgctgaataacttctatcccagagaggccaaagtacagtggaaggtggataacgccctccaatcgggtaactcccaggagagtgtcacagagcaggacagcaaggacagcacctacagcctcagcagcaccctgacgctgagcaaagcagactacgagaaacacaaagtctacgcctgcgaagtcacccatcagggcctgagctcgcccgtcacaaagagcttcaacaggggagagtgttag

SEQ ID NO: 185 - protein, 485 aa, Artificial Sequence
  Synthesized
EPKSSDKTHTCPPCPAPELLGGPSVFLFPPKPKDTLMISRTPEVTCVVVDVSHEDPEVKFNWYVDGVEVHNAKTKPREEQYNSTYRVVSVLTVLHQDWLNGKEYKCKVSNKALPAPIEKTISKAKGQPREPQVYTLPPSRDELTKNQVSLTCLVKGFYPSDIAVEWESNGQPENNYKTTPPVLDSDGSFFLYSKLTVDKSRWQQGNVFSCSVMHEALHNHYTQKSLSLSPGGGGGSGGGGSQVQLQESGGGLVKPGGSLRLSCAASGFTFSSYWMSWVRQAPGKGLEWVANINRDGSASYYVDSVKGRFTISRDDAKNSLYLQMNSLRAEDTAVYYCARDRGVGYFDLWGRGTLVTVSSGGGGSGGGGSGGGGSQSALTQPASVSGSPGQSITISCTGTSSDVGGYNFVSWYQQHPGKAPKLMIYDVSDRPSGVSDRFSGSKSGNTASLIISGLQADDEADYYCSSYGSSSTHVIFGGGTKVTVL

SEQ ID NO: 186 - DNA, 1458 bp, Artificial Sequence
  Synthesized
gagcccaaatcttccgacaaaactcacacatgcccaccgtgcccagcacctgaactcctggggggaccgtcagtcttcctcttccccccaaaacccaaggacaccctcatgatctcccggacccctgaggtcacatgcgtggtggtggacgtgagccacgaagaccctgaggtcaagttcaactggtacgtggacggcgtggaggtgcataatgccaagacaaagccgcgggaggagcagtacaacagcacgtaccgtgtggtcagcgtcctcaccgtcctgcaccaggactggctgaatggcaaggagtacaagtgcaaggtctccaacaaagccctcccagcccccatcgagaaaaccatctccaaagccaaagggcagccccgagaaccacaggtgtacaccctgcccccatcccgggatgagctgaccaagaaccaggtcagcctgacctgcctggtcaaaggcttctatcccagcgacatcgccgtggagtgggagagcaatgggcagccggagaacaactacaagaccacgcctcccgtgctggactccgacggctccttcttcctctatagcaagctcaccgtggacaagagcaggtggcagcaggggaacgtcttctcatgctccgtgatgcatgaggctctgcacaaccactacacgcagaagagcctctccctgtctccgggtggcggtggagggtccggcggtggtggatcccaggtgcagctgcaggagtcggggggaggcctggtcaagcctggagggtccctgagactctcctgtgcagcctctggattcacctttagtagttattggatgagctgggtccgccaggctccagggaaggggctggagtgggtggccaacataaaccgcgatggaagtgcgagttactatgtggactctgtgaagggccgattcaccatctccagagacgacgccaagaactcactgtatctgcaaatgaacagcctgagagctgaggacacggctgtgtattactgtgcgagagatcgtggggtgggctacttcgatctctggggccgtggcaccctggtcaccgtctcgagcggtggaggcggttcaggcggaggtggttccggcggtggcggctcccagtctgccctgactcagcctgcctccgtgtctgggtctcctggacagtcgatcaccatctcctgcactggaaccagcagtgacgttggtggttataactttgtctcctggtaccaacaacacccaggcaaagcccccaaactcatgatctatgatgtcagtgatcggccctcaggggtgtctgatcgcttctccggctccaagtctggcaacacggcctccctgatcatctctggcctccaggctgacgacgaggctgattattactgcagctcatatgggagcagcagcactcatgtgattttcggcggagggaccaaggtgaccgtcctataa

SEQ ID NO: 187 - protein, 449 aa, Artificial Sequence
  Synthesized
EVQLVESGGGLVQPGGSLRLSCTASGFTISTNAMSWVRQAPGKGLEWVGVITGRDITYYASWAKGRFTISRDTSKNTVYLQMNSLRAEDTAVYYCARDGGSSAITSNNIWGQGTLVTVSSASTKGPSVFPLAPSSKSTSGGTAALGCLVKDYFPEPVTVSWNSGALTSGVHTFPAVLQSSGLYSLSSVVTVPSSSLGTQTYICNVNHKPSNTKVDKRVEPKSCDKTHTCPPCPAPEAAGAPSVFLFPPKPKDTLMISRTPEVTCVVVDVSHEDPEVKFNWYVDGVEVHNAKTKPREEQYNSTYRVVSVLTVLHQDWLNGKEYKCAVSNKALPAPIEKTISKAKGQPREPQVYTLPPSRDELTKNQVSLTCLVKGFYPSDIAVEWESNGQPENNYKTTPPVLDSDGSFLLYSKLTVDKSRWQQGNVFSCSVMHEALHNHYTQKSLSLSPG

SEQ ID NO: 188 - DNA, 1350 bp, Artificial Sequence
  Synthesized
gaagtccaattggtagaaagtggcggtggtctggtgcaacctggtggatctcttcgcctctcatgcacggctagtggctttactatttcaactaatgcgatgagctgggttcgccaggcccccggcaaaggacttgagtgggtcggcgtcatcaccggcagggacattacatactatgcgagttgggcaaagggcaggttcacgattagccgcgatacttcaaagaataccgtttaccttcaaatgaatagcttgcgcgcggaagacacagctgtgtattactgcgcgcgggatggaggtagttccgccataacttccaacaacatatggggacaaggcacgctggttactgtgtcgtcagctagcaccaagggcccatcggtcttccccctggcaccctcctccaagagcacctctgggggcacagcggccctgggctgcctggtcaaggactacttccccgaaccggtgacggtgtcgtggaactcaggcgccctgaccagcggcgtgcacaccttcccggctgtcctacagtcctcaggactctactccctcagcagcgtggtgaccgtgccctccagcagcttgggcacccagacctacatctgcaacgtgaatcacaagcccagcaacaccaaggtggacaagagagttgagcccaaatcttgtgacaaaactcacacatgcccaccgtgcccagcacctgaagccgcgggggcaccgtcagtcttcctcttccccccaaaacccaaggacaccctcatgatctcccggacccctgaggtcacatgcgtggtggtggacgtgagccacgaagaccctgaggtcaagttcaactggtacgtggacggcgtggaggtgcataatgccaagacaaagccgcgggaggagcagtacaacagcacgtaccgtgtggtcagcgtcctcaccgtcctgcaccaggactggctgaatggcaaggagtacaagtgcgcggtctccaacaaagccctcccagcccccatcgagaaaaccatctccaaagccaaagggcagccccgagaaccacaggtgtacaccctgcccccatcccgggatgagctgaccaagaaccaggtcagcctgacctgcctggtcaaaggcttctatcccagcgacatcgccgtggagtgggagagcaatgggcagccggagaacaactacaagaccacgcctcccgtgctggactccgacggctccttcctgctctatagcaagctcaccgtggacaagagcaggtggcagcaggggaacgtcttctcatgctccgtgatgcatgaggctctgcacaaccactacacgcagaagagcctctccctgtctccgggttga

SEQ ID NO: 189 - protein, 219 aa, Artificial Sequence
  Synthesized
EIVMTQSPSTLSASVGDRVIITCQASESISSWLAWYQQKPGKAPKLLIYEASKLASGVPSRFSGSGSGAEFTLTISSLQPDDFATYYCQGYFYFISRTYVNSFGQGTKLTVLRTVAAPSVFIFPPSDEQLKSGTASVVCLLNNFYPREAKVQWKVDNALQSGNSQESVTEQDSKDSTYSLSSTLTLSKADYEKHKVYACEVTHQGLSSPVTKSFNRGEC

SEQ ID NO: 190 - DNA, 660 bp, Artificial Sequence
  Synthesized
gaaatcgttatgacgcagagtccctccacgctctccgctagtgtcggggatcgcgtcattatcacatgccaggcctccgagtcaatcagcagctggcttgcatggtatcaacagaagccgggaaaagctcctaaattgctgatctatgaagcgtcaaaattggcgtctggtgtcccatctaggttctccggctctgggtctggtgcggaatttactttgacaatctccagtcttcaaccagacgatttcgctacctactactgccaagggtatttctattttataagccggacatatgtaaactccttcggccaaggaacaaagttgactgttcttcgtacggtggctgcaccatctgtcttcatcttcccgccatctgatgagcagttgaaatctggaactgcctctgttgtgtgcctgctgaataacttctatcccagagaggccaaagtacagtggaaggtggataacgccctccaatcgggtaactcccaggagagtgtcacagagcaggacagcaaggacagcacctacagcctcagcagcaccctgacgctgagcaaagcagactacgagaaacacaaagtctacgcctgcgaagtcacccatcagggcctgagctcgcccgtcacaaagagcttcaacaggggagagtgttag

SEQ ID NO: 191 - protein, 487 aa, Artificial Sequence
  Synthesized
EPKSSDKTHTCPPCPAPEAAGAPSVFLFPPKPKDTLMISRTPEVTCVVVDVSHEDPEVKFNWYVDGVEVHNAKTKPREEQYNSTYRVVSVLTVLHQDWLNGKEYKCAVSNKALPAPIEKTISKAKGQPREPQVYTLPPSRDELTKNQVSLTCLVKGFYPSDIAVEWESNGQPENNYKTTPPVLDSDGSFFLYSKLTVDKSRWQQGNVFSCSVMHEALHNHYTQKSLSLSPGGGGGSGGGGSRSLVESGGGLVQPGGSLRLSCTASGFTISSYHMQWVRQAPGKGLEYIGTISSGGNVYYASSARGRFTISRPSSKNTVDLQMNSLRAEDTAVYYCARDSGYSDPMWGQGTLVTVSSGGGGSGGGGSGGGGSGGGGSDVVMTQSPSSVSASVGDRVTITCQASQNIRTYLSWYQQKPGKAPKLLIYAAANLASGVPSRFSGSGSGTDFTLTISDLEPGDAATYYCQSTYLGTDYVGGAFGGGTKVEIK

SEQ ID NO: 192 - DNA, 1464 bp, Artificial Sequence
  Synthesized
gagcccaaatcttccgacaaaactcacacatgcccaccgtgcccagcacctgaagccgcgggggcaccgtcagtcttcctcttccccccaaaacccaaggacaccctcatgatctcccggacccctgaggtcacatgcgtggtggtggacgtgagccacgaagaccctgaggtcaagttcaactggtacgtggacggcgtggaggtgcataatgccaagacaaagccgcgggaggagcagtacaacagcacgtaccgtgtggtcagcgtcctcaccgtcctgcaccaggactggctgaatggcaaggagtacaagtgcgcggtctccaacaaagccctcccagcccccatcgagaaaaccatctccaaagccaaagggcagccccgagaaccacaggtgtacaccctgcccccatcccgggatgagctgaccaagaaccaggtcagcctgacctgcctggtcaaaggcttctatcccagcgacatcgccgtggagtgggagagcaatgggcagccggagaacaactacaagaccacgcctcccgtgctggactccgacggctccttcttcctctatagcaagctcaccgtggacaagagcaggtggcagcaggggaacgtcttctcatgctccgtgatgcatgaggctctgcacaaccactacacgcagaagagcctctccctgtctccgggtggcggtggagggtccggcggtggtggatcccggtcgctggtggagtctgggggaggcttggtccagcctggggggtccctgagactctcctgtactgcctctggattcaccatcagtagctaccacatgcagtgggtccgccaggctccagggaaggggctggagtacatcggaaccattagtagtggtggtaatgtatactacgcgagctccgcgagaggcagattcaccatctccagaccctcgtccaagaacacggtggatcttcaaatgaacagcctgagagccgaggacacggctgtgtattactgtgcgagagactctggttatagtgatcctatgtggggccagggaaccctggtcaccgtctcttcaggcggtggcggtagtgggggaggcggttctggcggcggagggtccggcggtggaggatcagacgttgtgatgacccagtctccatcttccgtgtctgcatctgtaggagacagagtcaccatcacctgtcaggccagtcagaacattaggacttacttatcctggtatcagcagaaaccagggaaagcccctaagctcctgatctatgctgcagccaatctggcatctggggtcccatcaaggttcagcggcagtggatctgggacagatttcactctcaccatcagcgacctggagcctggcgatgctgcaacttactattgtcagtctacctatcttggtactgattatgttggcggtgctttcggcggagggaccaaggtggagatcaaatga

SEQ ID NO: 193 - protein, 493 aa, Artificial Sequence
  Synthesized
EPKSSDKTHTCPPCPAPEAAGAPSVFLFPPKPKDTLMISRTPEVTCVVVDVSHEDPEVKFNWYVDGVEVHNAKTKPREEQYNSTYRVVSVLTVLHQDWLNGKEYKCAVSNKALPAPIEKTISKAKGQPREPQVYTLPPSRDELTKNQVSLTCLVKGFYPSDIAVEWESNGQPENNYKTTPPVLDSDGSFFLYSKLTVDKSRWQQGNVFSCSVMHEALHNHYTQKSLSLSPGGGGGSGGGGSEVQLLESGGGLVQPGGSLRLSCAASGFSFSSGYDMCWVRQAPGKGLEWIACIAAGSAGITYDANWAKGRFTISRDNSKNTLYLQMNSLRAEDTAVYYCARSAFSFDYAMDLWGQGTLVTVSSGGGGSGGGGSGGGGSGGGGSDIQMTQSPSTLSASVGDRVTITCQASQSISSHLNWYQQKPGKAPKLLIYKASTLASGVPSRFSGSGSGTEFTLTISSLQPDDFATYYCQQGYSWGNVDNVFGGGTKVEIK

SEQ ID NO: 194 - DNA, 1482 bp, Artificial Sequence
  Synthesized
gagcccaaatcttccgacaaaactcacacatgcccaccgtgcccagcacctgaagccgcgggggcaccgtcagtcttcctcttccccccaaaacccaaggacaccctcatgatctcccggacccctgaggtcacatgcgtggtggtggacgtgagccacgaagaccctgaggtcaagttcaactggtacgtggacggcgtggaggtgcataatgccaagacaaagccgcgggaggagcagtacaacagcacgtaccgtgtggtcagcgtcctcaccgtcctgcaccaggactggctgaatggcaaggagtacaagtgcgcggtctccaacaaagccctcccagcccccatcgagaaaaccatctccaaagccaaagggcagccccgagaaccacaggtgtacaccctgcccccatcccgggatgagctgaccaagaaccaggtcagcctgacctgcctggtcaaaggcttctatcccagcgacatcgccgtggagtgggagagcaatgggcagccggagaacaactacaagaccacgcctcccgtgctggactccgacggctccttcttcctctatagcaagctcaccgtggacaagagcaggtggcagcaggggaacgtcttctcatgctccgtgatgcatgaggctctgcacaaccactacacgcagaagagcctctccctgtctccgggtggcggtggagggtccggcggtggtggatccgaggtgcagctgttggagtctgggggaggcttggtacagcctggggggtccctgagactctcctgtgcagcctctggattctccttcagtagcgggtacgacatgtgctgggtccgccaggctccagggaaggggctggagtggatcgcatgcattgctgctggtagtgctggtatcacttacgacgcgaactgggcgaaaggccggttcaccatctccagagacaattccaagaacacgctgtatctgcaaatgaacagcctgagagccgaggacacggccgtatattactgtgcgagatcggcgttttcgttcgactacgccatggacctctggggccagggaaccctggtcaccgtctcgagcggtggaggcggatctggcggaggtggttccggcggtggcggctccggtggaggcggctctgacatccagatgacccagtctccttccaccctgtctgcatctgtaggagacagagtcaccatcacttgccaggccagtcagagcattagttcccacttaaactggtatcagcagaaaccagggaaagcccctaagctcctgatctataaggcatccactctggcatctggggtcccatcaaggttcagcggcagtggatctgggacagaatttactctcaccatcagcagcctgcagcctgatgattttgcaacttattactgccaacagggttatagttggggtaatgttgataatgttttcggcggagggaccaaggtggagatcaaataa

SEQ ID NO: 195 - protein, 713 aa, Artificial Sequence
  Synthesized
DIQMTQSPSTLSASVGDRVTITCQASENIYSNLAWYQQKPGKAPKLLIYDASTLASGVPSRFSGSGSGTEFTLTISSLQPDDFATYYCQSTYYNNIIYGAAFGCGTKVEIKGGGGSGGGGSGGGGSGGGGSEVQLVESGGGLVQPGGSLRLSCAASGFSFSGTQYVCWVRQAPGKCLEWIGCIYVDVANTYYATSVKGRFTISRDNSKNTLYLQMNSLRAEDTAVYYCASHDTVCAGCGLDLWGQGTLVTVSTGGGGSGGGGSEVQLVESGGGLVQPGGSLRLSCAASGFTISTNAMSWVRQAPGKGLEWIGVITGRDITYYASWAKGRFTISRDNSKNTLYLQMNSLRAEDTAVYYCARDGGSSAITSNNIWGQGTLVTVSSASTKGPSVFPLAPSSKSTSGGTAALGCLVKDYFPEPVTVSWNSGALTSGVHTFPAVLQSSGLYSLSSVVTVPSSSLGTQTYICNVNHKPSNTKVDKRVEPKSCDKTHTCPPCPAPEAAGGPSVFLFPPKPKDTLMISRTPEVTCVVVDVSHEDPEVKFNWYVDGVEVHNAKTKPREEQYASTYRVVSVLTVLHQDWLNGKEYKCAVSNKALPAPIEKTISKAKGQPREPQVCTLPPSRDELTKNQVSLSCAVKGFYPSDIAVEWESNGQPENNYKTTPPVLDSDGSFFLVSKLTVDKSRWQQGNVFSCSVMHEALHNHYTQKSLSLSPGK

SEQ ID NO: 196 - DNA, 2139 bp, Artificial Sequence
  Synthesized
gacatccagatgacccagtctccttccaccctgtctgcatctgtaggagacagagtcaccatcacttgccaggccagtgagaacatttacagcaatttagcctggtatcagcagaaaccagggaaagcccctaagctcctgatctatgatgcttccactctggcatctggggtcccatcaaggttcagcggcagtggatctgggacagaattcactctcaccatcagcagcctgcagcctgatgattttgcaacttattactgccaatctacttattataataatatcatttatggggctgctttcggctgtgggaccaaggtggagatcaaaggcggtggcggtagtgggggaggcggttctggcggcggagggtccggcggtggaggatcagaggtgcagctggtggagtctgggggaggcttggtccagcctggggggtccctgagactctcctgtgcagcctctggattctccttcagtggcacccagtacgtgtgctgggtccgccaggctccagggaagtgcctggagtggatcggatgcatttatgtggatgtggctaacacttactacgcgacctccgtgaagggcagattcaccatctccagagacaattccaagaacacgctgtatcttcaaatgaacagcctgagagccgaggacacggctgtgtattactgtgcgagtcatgatactgtttgtgctggttgtggtttggacttgtggggccagggaaccctggtcaccgtgtcgacaggcggtggagggtccggcggtggtggatcagaggtgcagctggtggagtctgggggaggcttggtccagcctggggggtccctgagactctcctgtgcagcctctggattcaccatcagtaccaatgcaatgagctgggtccgccaggctccagggaaggggctggagtggatcggagtcattactggtcgtgatatcacatactacgcgagctgggcgaaaggcagattcaccatctccagagacaattccaagaacacgctgtatcttcaaatgaacagcctgagagccgaggacacggctgtgtattactgtgcgagagacggtggttcttctgctattactagtaacaacatttggggccagggaaccctggtcaccgtgtcctcagctagcaccaagggcccatcggtcttccccctggcaccctcctccaagagcacctctgggggcacagcggccctgggctgcctggtcaaggactacttccccgaaccggtgacggtgtcgtggaactcaggcgccctgaccagcggcgtgcacaccttcccggctgtcctacagtcctcaggactctactccctcagcagcgtggtgaccgtgccctccagcagcttgggcacccagacctacatctgcaacgtgaatcacaagcccagcaacaccaaggtggacaagagagttgagcccaaatcttgtgacaaaactcacacatgcccaccgtgcccagcacctgaagccgcggggggaccgtcagtcttcctcttccccccaaaacccaaggacaccctcatgatctcccggacccctgaggtcacatgcgtggtggtggacgtgagccacgaagaccctgaggtcaagttcaactggtacgtggacggcgtggaggtgcataatgccaagacaaagccgcgggaggagcagtacgccagcacgtaccgtgtggtcagcgtcctcaccgtcctgcaccaggactggctgaatggcaaggagtacaagtgcgcggtctccaacaaagccctcccagcccccatcgagaaaaccatctccaaagccaaagggcagccccgagaaccacaggtgtgtaccctgcccccatcccgggatgagctgaccaagaaccaggtcagcctgtcctgcgccgtcaaaggcttctatcccagcgacatcgccgtggagtgggagagcaatgggcagccggagaacaactacaagaccacgcctcccgtgctggactccgacggctccttcttcctcgtgagcaagctcaccgtggacaagagcaggtggcagcaggggaacgtcttctcatgctccgtgatgcatgaggctctgcacaaccactacacgcagaagagcctctccctgtctccgggtaaa

SEQ ID NO: 197 - protein, 704 aa, Artificial Sequence
  Synthesized
DIQMTQSPSSLSASVGDRVTITCQASQDISNYLNWYQQKPGKAPKLLIYDASNLETGVPSRFSGSGSGTDFTFTISSLQPEDIATYFCQHFDHLPLAFGCGTKVEIKGGGGSGGGGSGGGGSGGGGSQVQLQESGPGLVKPSETLSLTCTVSGGSVSSGDYYWTWIRQSPGKCLEWIGHIYYSGNTNYNPSLKSRLTISIDTSKTQFSLKLSSVTAADTAIYYCVRDRVTGAFDIWGQGTMVTVSTGGGGSGGGGSDVVMTQSPSTLSASVGDRVTINCQASESISSWLAWYQQKPGKAPKLLIYEASKLASGVPSRFSGSGSGTEFTLTISSLQPDDFATYYCQGYFYFISRTYVNSFGGGTKVEIKRTVAAPSVFIFPPSDEQLKSGTASVVCLLNNFYPREAKVQWKVDNALQSGNSQESVTEQDSKDSTYSLSSTLTLSKADYEKHKVYACEVTHQGLSSPVTKSFNRGECGGDKTHTCPPCPAPEAAGGPSVFLFPPKPKDTLMISRTPEVTCVVVDVSHEDPEVKFNWYVDGVEVHNAKTKPREEQYASTYRVVSVLTVLHQDWLNGKEYKCAVSNKALPAPIEKTISKAKGQPREPQVYTLPPCRDELTKNQVSLWCLVKGFYPSDIAVEWESNGQPENNYKTTPPVLDSDGSFFLYSKLTVDKSRWQQGNVFSCSVMHEALHNHYTQKSLSLSPGK

SEQ ID NO: 198 - DNA, 2112 bp, Artificial Sequence
  Synthesized
gacatccagatgacccagtctccatcctccctgtctgcatctgtaggagacagagtcaccatcacttgccaggcgagtcaggacatcagcaactatttaaattggtatcagcagaaaccagggaaagcccctaaactcctgatctacgatgcatccaatttggaaacaggggtcccatcaaggttcagtggaagtggatctgggacagattttactttcaccatcagcagcctgcagcctgaagatattgcaacatatttctgtcaacactttgatcatctcccgctcgctttcggctgtgggaccaaggtggaaattaaaggcggtggcggtagtgggggaggcggttctggcggcggagggtccggcggtggaggatcacaggtgcagctgcaggagtcgggcccaggactggtgaagccttcggagaccctgtccctcacctgcactgtctctggtggctccgtcagcagtggtgattactactggacctggatccggcagtccccagggaagtgcctggagtggattggacacatctattacagtgggaacaccaattataacccctccctcaagagccgactcaccatatcaattgacacgtccaagactcagttctccctgaagctgagttctgtgaccgctgcggacacggccatttattactgtgtgcgagatcgagtgactggtgcttttgatatctggggccaagggacaatggtcaccgtgtcgacaggcggtggagggtccggcggtggtggatcagacgtcgtgatgacccagtctccttccaccctgtctgcatctgtaggagacagagtcaccatcaattgccaagccagtgagagcattagcagttggttagcctggtatcagcagaaaccagggaaagcccctaagctcctgatctatgaagcatccaaactggcatctggggtcccatcaaggttcagcggcagtggatctgggacagaattcactctcaccatcagcagcctgcagcctgatgattttgcaacttattactgccaaggctatttttattttattagtcgtacttatgtaaattctttcggcggagggaccaaggtggagatcaaacgtacggtggctgcaccatctgtcttcatcttcccgccatctgatgagcagttgaaatctggaactgcctctgttgtgtgcctgctgaataacttctatcccagagaggccaaagtacagtggaaggtggataacgccctccaatcgggtaactcccaggagagtgtcacagagcaggacagcaaggacagcacctacagcctcagcagcaccctgacgctgagcaaagcagactacgagaaacacaaagtctacgcctgcgaagtcacccatcagggcctgagctcgcccgtcacaaagagcttcaacaggggagagtgtggaggcgacaaaactcacacatgcccaccgtgcccagcacctgaagccgcggggggaccgtcagtcttcctcttccccccaaaacccaaggacaccctcatgatctcccggacccctgaggtcacatgcgtggtggtggacgtgagccacgaagaccctgaggtcaagttcaactggtacgtggacggcgtggaggtgcataatgccaagacaaagccgcgggaggagcagtacgccagcacgtaccgtgtggtcagcgtcctcaccgtcctgcaccaggactggctgaatggcaaggagtacaagtgcgcggtctccaacaaagccctcccagcccccatcgagaaaaccatctccaaagccaaagggcagccccgagaaccacaggtgtacaccctgcccccatgtcgggatgagctgaccaagaaccaggtcagcctgtggtgcctggtcaaaggcttctatcccagcgacatcgccgtggagtgggagagcaatgggcagccggagaacaactacaagaccacgcctcccgtgctggactccgacggctccttcttcctctatagcaagctcaccgtggacaagagcaggtggcagcaggggaacgtcttctcatgctccgtgatgcatgaggctctgcacaaccactacacgcagaagagcctctccctgtctccgggtaaa

SEQ ID NO: 199 - protein, 707 aa, Artificial Sequence
  Synthesized
DIQMTQSPSSLSASVGDRVTITCRASQDVNTAVAWYQQKPGKAPKLLIYSASFLYSGVPSRFSGSRSGTDFTLTISSLQPEDFATYYCQQHYTTPPTFGQGTKVEIKGGGGSGGGGSGGGGSGGGGSEVQLVESGGGLVQPGGSLRLSCAASGFNIKDTYIHWVRQAPGKGLEWVARIYPTNGYTRYADSVKGRFTISADTSKNTAYLQMNSLRAEDTAVYYCSRWGGDGFYAMDYWGQGTLVTVSTGGGGSGGGGSEVQLVESGGGLVQPGGSLRLSCAASGFTISTNAMSWVRQAPGKGLEWIGVITGRDITYYASWAKGRFTISRDNSKNTLYLQMNSLRAEDTAVYYCARDGGSSAITSNNIWGQGTLVTVSSASTKGPSVFPLAPSSKSTSGGTAALGCLVKDYFPEPVTVSWNSGALTSGVHTFPAVLQSSGLYSLSSVVTVPSSSLGTQTYICNVNHKPSNTKVDKRVEPKSCDKTHTCPPCPAPEAAGGPSVFLFPPKPKDTLMISRTPEVTCVVVDVSHEDPEVKFNWYVDGVEVHNAKTKPREEQYASTYRVVSVLTVLHQDWLNGKEYKCAVSNKALPAPIEKTISKAKGQPREPQVCTLPPSRDELTKNQVSLSCAVKGFYPSDIAVEWESNGQPENNYKTTPPVLDSDGSFFLVSKLTVDKSRWQQGNVFSCSVMHEALHNHYTQKSLSLSPGK

SEQ ID NO: 200 - DNA, 2121 bp, Artificial Sequence
  Synthesized
gacatccaaatgacgcagtctccctccagtttgagtgcaagtgtgggagacagagttacgatcacatgtagggcaagtcaggacgtcaatacagccgtcgcatggtaccagcagaagcctggaaaggccccgaaacttctgatttactctgcaagtttcctctacagtggtgttcctagtcgcttcagtgggtctcggtcaggcaccgattttaccctgacaattagcagcttgcaaccggaagattttgcgacctattattgccagcaacattataccacccctcccacatttggacaaggcacgaaggtagagattaaaggcggtggagggagcggtggaggcggttccggtggaggtggttctggtggaggtggcagtgaagtacagcttgttgagagtggtggtggacttgtccaaccagggggaagtctgcggctgtcatgcgcagcctctggcttcaacattaaggacacctacattcactgggttcggcaagcgccggggaaggggctggaatgggtcgccaggatataccctaccaacgggtacaccaggtatgcagatagcgttaagggtagattcactatttcagctgacactagcaagaacaccgcgtatctccagatgaactcccttcgcgccgaggatacggctgtgtactactgctctaggtggggaggagatgggttttacgcaatggattactggggacagggaacactcgttacggtgtcgacaggcggtggagggtccggcggtggtggatcagaggtgcagctggtggagtctgggggaggcttggtccagcctggggggtccctgagactctcctgtgcagcctctggattcaccatcagtaccaatgcaatgagctgggtccgccaggctccagggaaggggctggagtggatcggagtcattactggtcgtgatatcacatactacgcgagctgggcgaaaggcagattcaccatctccagagacaattccaagaacacgctgtatcttcaaatgaacagcctgagagccgaggacacggctgtgtattactgtgcgagagacggtggttcttctgctattactagtaacaacatttggggccagggaaccctggtcaccgtgtcctcagctagcaccaagggcccatcggtcttccccctggcaccctcctccaagagcacctctgggggcacagcggccctgggctgcctggtcaaggactacttccccgaaccggtgacggtgtcgtggaactcaggcgccctgaccagcggcgtgcacaccttcccggctgtcctacagtcctcaggactctactccctcagcagcgtggtgaccgtgccctccagcagcttgggcacccagacctacatctgcaacgtgaatcacaagcccagcaacaccaaggtggacaagagagttgagcccaaatcttgtgacaaaactcacacatgcccaccgtgcccagcacctgaagccgcggggggaccgtcagtcttcctcttccccccaaaacccaaggacaccctcatgatctcccggacccctgaggtcacatgcgtggtggtggacgtgagccacgaagaccctgaggtcaagttcaactggtacgtggacggcgtggaggtgcataatgccaagacaaagccgcgggaggagcagtacgccagcacgtaccgtgtggtcagcgtcctcaccgtcctgcaccaggactggctgaatggcaaggagtacaagtgcgcggtctccaacaaagccctcccagcccccatcgagaaaaccatctccaaagccaaagggcagccccgagaaccacaggtgtgtaccctgcccccatcccgggatgagctgaccaagaaccaggtcagcctgtcctgcgccgtcaaaggcttctatcccagcgacatcgccgtggagtgggagagcaatgggcagccggagaacaactacaagaccacgcctcccgtgctggactccgacggctccttcttcctcgtgagcaagctcaccgtggacaagagcaggtggcagcaggggaacgtcttctcatgctccgtgatgcatgaggctctgcacaaccactacacgcagaagagcctctccctgtctccgggtaaa

SEQ ID NO: 201 - protein, 448 aa, Artificial Sequence
  Synthesized
DVVMTQSPSTLSASVGDRVTINCQASESISSWLAWYQQKPGKAPKLLIYEASKLASGVPSRFSGSGSGTEFTLTISSLQPDDFATYYCQGYFYFISRTYVNSFGGGTKVEIKRTVAAPSVFIFPPSDEQLKSGTASVVCLLNNFYPREAKVQWKVDNALQSGNSQESVTEQDSKDSTYSLSSTLTLSKADYEKHKVYACEVTHQGLSSPVTKSFNRGECGGDKTHTCPPCPAPEAAGGPSVFLFPPKPKDTLMISRTPEVTCVVVDVSHEDPEVKFNWYVDGVEVHNAKTKPREEQYASTYRVVSVLTVLHQDWLNGKEYKCAVSNKALPAPIEKTISKAKGQPREPQVYTLPPCRDELTKNQVSLWCLVKGFYPSDIAVEWESNGQPENNYKTTPPVLDSDGSFFLYSKLTVDKSRWQQGNVFSCSVMHEALHNHYTQKSLSLSPGK

SEQ ID NO: 202 - DNA, 1344 bp, Artificial Sequence
  Synthesized
gacgtcgtgatgacccagtctccttccaccctgtctgcatctgtaggagacagagtcaccatcaattgccaagccagtgagagcattagcagttggttagcctggtatcagcagaaaccagggaaagcccctaagctcctgatctatgaagcatccaaactggcatctggggtcccatcaaggttcagcggcagtggatctgggacagaattcactctcaccatcagcagcctgcagcctgatgattttgcaacttattactgccaaggctatttttattttattagtcgtacttatgtaaattctttcggcggagggaccaaggtggagatcaaacgtacggtggctgcaccatctgtcttcatcttcccgccatctgatgagcagttgaaatctggaactgcctctgttgtgtgcctgctgaataacttctatcccagagaggccaaagtacagtggaaggtggataacgccctccaatcgggtaactcccaggagagtgtcacagagcaggacagcaaggacagcacctacagcctcagcagcaccctgacgctgagcaaagcagactacgagaaacacaaagtctacgcctgcgaagtcacccatcagggcctgagctcgcccgtcacaaagagcttcaacaggggagagtgtggaggcgacaaaactcacacatgcccaccgtgcccagcacctgaagccgcggggggaccgtcagtcttcctcttccccccaaaacccaaggacaccctcatgatctcccggacccctgaggtcacatgcgtggtggtggacgtgagccacgaagaccctgaggtcaagttcaactggtacgtggacggcgtggaggtgcataatgccaagacaaagccgcgggaggagcagtacgccagcacgtaccgtgtggtcagcgtcctcaccgtcctgcaccaggactggctgaatggcaaggagtacaagtgcgcggtctccaacaaagccctcccagcccccatcgagaaaaccatctccaaagccaaagggcagccccgagaaccacaggtgtacaccctgcccccatgtcgggatgagctgaccaagaaccaggtcagcctgtggtgcctggtcaaaggcttctatcccagcgacatcgccgtggagtgggagagcaatgggcagccggagaacaactacaagaccacgcctcccgtgctggactccgacggctccttcttcctctatagcaagctcaccgtggacaagagcaggtggcagcaggggaacgtcttctcatgctccgtgatgcatgaggctctgcacaaccactacacgcagaagagcctctccctgtctccgggtaaa

SEQ ID NO: 203 - protein, 119 aa, Artificial Sequence
  Synthesized
QVQLQQSGPGLVKPSETLSITCTVSGFSLTNYGVHWIRQAPGKGLEWLGVIWSGGNTDYNTPFTSRFTITKDNSKNQVYFKLRSVRADDTAIYYCARALTYYDYEFAYWGQGTLVTVSS

SEQ ID NO: 204 - DNA, 357 bp, Artificial Sequence
  Synthesized
caagtacagttgcagcaatccggtcccggtctcgtcaaaccgagtgagacgcttagtataacgtgtactgtttcaggctttagccttacgaactatggagttcactggattcggcaggcacccggcaaaggtttggaatggctgggtgttatttggtcaggtggaaatacagactataacaccccctttacaagtcggttcacaattacgaaagataattccaaaaatcaagtttatttcaagttgagatccgtccgcgcggacgacactgcgatctactattgtgcgagggcactgacctactacgattacgaatttgcgtattgggggcaagggactcttgtaacagtctcgagc

SEQ ID NO: 205 - protein, 107 aa, Artificial Sequence
  Synthesized
EIVLTQSPSTLSVSPGERATFSCRASQSIGTNIHWYQQKPGKPPRLLIKYASESISGIPDRFSGSGSGTEFTLTISSVQSEDFAVYYCQQNNNWPTTFGPGTKLTVL

SEQ ID NO: 206 - DNA, 321 bp, Artificial Sequence
  Synthesized
gaaatcgtccttacacaatctcctagcacactgagtgtgagccccggcgaacgcgcgactttctcttgcagggcaagtcaatccatagggactaatatacattggtatcaacaaaagccaggtaaaccacccaggcttttgattaagtatgcaagtgagtctatttccggtatccctgaccgcttctctggatcaggcagtggcacagagttcacactcaccatatctagtgtgcaatcagaggacttcgccgtgtattactgccaacagaataataactggccgactaccttcggacccggtacaaagctgaccgtttta

SEQ ID NO: 207 - protein, 119 aa, Artificial Sequence [sequence omitted]

SEQ ID NO: 208 - DNA, 357 bp, Artificial Sequence
  Synthesized
caagtgcaactccaggagagtgggccgggattggttaaaccgagcgagaccctgagtctcacgtgtacagtttcaggcgggagcgtgagctcaggcgactattactggacatggataagacagagtcctggaaagggcctggagtggatcggtcatatttattattcagggaacactaactataatccatctttgaaatcccgattgacaatctctatcgataccagtaaaacccagtttagcctcaagctgtccagcgttactgctgcagacacagccatatactattgcgtacgcgatcgcgtgactggagccttcgacatatgggggcagggaacgatggtaacagtctcgagc

SEQ ID NO: 209 - protein, 107 aa, Artificial Sequence [sequence omitted]

SEQ ID NO: 210 - DNA, 321 bp, Artificial Sequence
  Synthesized
gacatccagatgacccagtctccatcctccctgtctgcatctgtaggagacagagtcaccatcacttgccaggcgagtcaggacatcagcaactatttaaattggtatcagcagaaaccagggaaagcccctaaactcctgatctacgatgcatccaatttggaaacaggggtcccatcaaggttcagtggaagtggatctgggacagattttactttcaccatcagcagcctgcagcctgaagatattgcaacatatttctgtcaacactttgatcatctcccgctcgctttcggcggagggaccaaggtggaaattaaa

SEQ ID NO: 211 - protein, 119 aa, Artificial Sequence
  Synthesized
QVQLQESGPGLVKPSETLSLTCTVSGGSVSSGDYYWTWIRQSPGKCLEWIGHIYYSGNTNYNPSLKSRLTISIDTSKTQFSLKLSSVTAADTAIYYCVRDRVTGAFDIWGQGTMVTVST

SEQ ID NO: 212 - DNA, 357 bp, Artificial Sequence
  Synthesized
caggtgcagctgcaggagtcgggcccaggactggtgaagccttcggagaccctgtccctcacctgcactgtctctggtggctccgtcagcagtggtgattactactggacctggatccggcagtccccagggaagtgcctggagtggattggacacatctattacagtgggaacaccaattataacccctccctcaagagccgactcaccatatcaattgacacgtccaagactcagttctccctgaagctgagttctgtgaccgctgcggacacggccatttattactgtgtgcgagatcgagtgactggtgcttttgatatctggggccaagggacaatggtcaccgtgtcgaca

SEQ ID NO: 213 - protein, 107 aa, Artificial Sequence
  Synthesized
DIQMTQSPSSLSASVGDRVTITCQASQDISNYLNWYQQKPGKAPKLLIYDASNLETGVPSRFSGSGSGTDFTFTISSLQPEDIATYFCQHFDHLPLAFGCGTKVEIK

SEQ ID NO: 214 - DNA, 321 bp, Artificial Sequence
  Synthesized
gacatccagatgacccagtctccatcctccctgtctgcatctgtaggagacagagtcaccatcacttgccaggcgagtcaggacatcagcaactatttaaattggtatcagcagaaaccagggaaagcccctaaactcctgatctacgatgcatccaatttggaaacaggggtcccatcaaggttcagtggaagtggatctgggacagattttactttcaccatcagcagcctgcagcctgaagatattgcaacatatttctgtcaacactttgatcatctcccgctcgctttcggctgtgggaccaaggtggaaattaaa

SEQ ID NO: 215 - protein, 120 aa, Artificial Sequence
  Synthesized
QVTLKESGPGLVQPGQTLSLTCAFSGFSLSTSGMGVGWIRQPPGKGLEWLAHIWWDDDKRYNPALKSRLTISKDTSKNQVYLQMNSLDAEDTAVYYCARMELWSYYFDYWGQGTLVTVSS

SEQ ID NO: 216 - DNA, 360 bp, Artificial Sequence
  Synthesized
caggtcacattgaaggaatctggccccggccttgttcagccaggacagacccttagcctcacctgtgccttcagtggtttttctcttagcactagcggtatgggggtcggctggattcggcagcctcccggcaaaggtcttgagtggttggctcacatttggtgggacgacgacaaacggtataatcctgccttgaaaagtcggctgaccattagtaaggatacctcaaaaaatcaagtgtacttgcaaatgaatagccttgacgccgaggatacggctgtatattattgcgcgcggatggaactctggtcttactactttgattattgggggcaggggactctcgtcacggtctcgagc

SEQ ID NO: 217 - protein, 106 aa, Artificial Sequence
  Synthesized
ENVLTQSPASLSASPGERVTITCSASSSVSYMHWYQQKPGQAPKLWIYDTSKLASGVPSRFSGSGSGNDHTLTISSMEPEDFATYYCFQGSVYPFTFGQGTKVTVL

SEQ ID NO: 218 - DNA, 318 bp, Artificial Sequence
  Synthesized
gaaaatgtattgacacagagccccgcctccctcagtgcctcacctggggaaagggtaactatcacttgctctgcatcaagcagcgtctcatacatgcattggtatcaacaaaagcctggacaggcccccaagctctggatatacgatacgagcaagctggcttccggcgtacctagccgcttcagtggttccggctcaggcaacgatcacacccttacgatttccagtatggaacccgaagattttgcaacttattattgtttccaggggagcgtgtacccattcactttcgggcaggggacaaaagtgaccgtccta

SEQ ID NO: 219 - protein, 120 aa, Artificial Sequence
  Synthesized
EVQLVESGGGLVQPGGSLRLSCAASGFTISTNAMSWVRQAPGKGLEWIGVITGRDITYYASWAKGRFTISRDNSKNTLYLQMNSLRAEDTAVYYCARDGGSSAITSNNIWGQGTLVTVSS

SEQ ID NO: 220 - DNA, 360 bp, Artificial Sequence
  Synthesized
gaggtgcagctggtggagtctgggggaggcttggtccagcctggggggtccctgagactctcctgtgcagcctctggattcaccatcagtaccaatgcaatgagctgggtccgccaggctccagggaaggggctggagtggatcggagtcattactggtcgtgatatcacatactacgcgagctgggcgaaaggcagattcaccatctccagagacaattccaagaacacgctgtatcttcaaatgaacagcctgagagccgaggacacggctgtgtattactgtgcgagagacggtggttcttctgctattactagtaacaacatttggggccagggaaccctggtcaccgtgtcctca

SEQ ID NO: 221 - protein, 112 aa, Artificial Sequence
  Synthesized
DVVMTQSPSTLSASVGDRVTINCQASESISSWLAWYQQKPGKAPKLLIYEASKLASGVPSRFSGSGSGTEFTLTISSLQPDDFATYYCQGYFYFISRTYVNSFGGGTKVEIK

SEQ ID NO: 222 - DNA, 336 bp, Artificial Sequence
  Synthesized
gacgtcgtgatgacccagtctccttccaccctgtctgcatctgtaggagacagagtcaccatcaattgccaagccagtgagagcattagcagttggttagcctggtatcagcagaaaccagggaaagcccctaagctcctgatctatgaagcatccaaactggcatctggggtcccatcaaggttcagcggcagtggatctgggacagaattcactctcaccatcagcagcctgcagcctgatgattttgcaacttattactgccaaggctatttttattttattagtcgtacttatgtaaattctttcggcggagggaccaaggtggagatcaaa

SEQ ID NO: 223 - protein, 120 aa, Artificial Sequence
  Synthesized
EVQLVESGGGLVQPGGSLRLSCAASGFTISTNAMSWVRQAPGKCLEWIGVITGRDITYYASWAKGRFTISRDNSKNTLYLQMNSLRAEDTAVYYCARDGGSSAITSNNIWGQGTLVTVSS

SEQ ID NO: 224 - DNA, 360 bp, Artificial Sequence
  Synthesized
gaggtgcagctggtggagtctgggggaggcttggtccagcctggggggtccctgagactctcctgtgcagcctctggattcaccatcagtaccaatgcaatgagctgggtccgccaggctccagggaagtgtctggagtggatcggagtcattactggtcgtgatatcacatactacgcgagctgggcgaaaggcagattcaccatctccagagacaattccaagaacacgctgtatcttcaaatgaacagcctgagagccgaggacacggctgtgtattactgtgcgagagacggtggttcttctgctattactagtaacaacatttggggccagggaaccctggtcaccgtgtcctca

SEQ ID NO: 225 - protein, 112 aa, Artificial Sequence
  Synthesized
DVVMTQSPSTLSASVGDRVTINCQASESISSWLAWYQQKPGKAPKLLIYEASKLASGVPSRFSGSGSGTEFTLTISSLQPDDFATYYCQGYFYFISRTYVNSFGCGTKVEIK

SEQ ID NO: 226 - DNA, 336 bp, Artificial Sequence
  Synthesized
gacgtcgtgatgacccagtctccttccaccctgtctgcatctgtaggagacagagtcaccatcaattgccaagccagtgagagcattagcagttggttagcctggtatcagcagaaaccagggaaagcccctaagctcctgatctatgaagcatccaaactggcatctggggtcccatcaaggttcagcggcagtggatctgggacagaattcactctcaccatcagcagcctgcagcctgatgattttgcaacttattactgccaaggctatttttattttattagtcgtacttatgtaaattctttcggctgtgggaccaaggtggagatcaaa

SEQ ID NO: 227 - protein, 113 aa, Artificial Sequence
  Synthesized
QVQLQESGGRLVQPGEPLSLTCKTSGIDLSSNAIGWVRQAPGKGLEWIGVIFGSGNTYYASWAKGRFTISRSTSTVYLKMNSLRSEDTAIYYCARGGYSSDIWGQGTLVTVSS

SEQ ID NO: 228 - DNA, 339 bp, Artificial Sequence
  Synthesized
caagtgcagttgcaagaaagtggtggtagactggttcagcctggtgaacccttgtcactgacgtgtaaaacaagcggcattgatctgtcctctaacgccatcggatgggtccgacaggccccaggaaaaggtctggagtggatcggagttatcttcgggagcggcaatacatactacgcaagctgggcaaaagggcgatttacgatatcacggagcacctctacagtttatttgaaaatgaactccctccggtccgaggataccgcgatatattactgtgccagaggggggtactcctctgatatctgggggcagggtacactggttacagtttcatcc

SEQ ID NO: 229 - protein, 110 aa, Artificial Sequence
  Synthesized
DPQLTQSPSSLSATVGQRVTINCQSSQSVAKNNNLAWFQQKPGKPPKLLIYSASTLAAGVPSRFSGSGSGTQFTLTITRVQSEDFATYYCSARDSGNIQSFGGGTRVEIK

SEQ ID NO: 230 - DNA, 330 bp, Artificial Sequence
  Synthesized
gatcctcaattgacccagtcccctagtagcctttctgcaaccgtgggccagagggtaacaatcaattgccagtcaagccagtccgtagcgaagaataataatttggcatggttccaacaaaaaccgggtaaacctcctaaactccttatctactcagcttcaacccttgccgcgggtgtgcccagccggttctcaggctcaggttccgggactcaatttacacttaccatcactcgcgtccaaagtgaggattttgcaacctactattgttctgcacgggattccgggaacatacagtcctttgggggtggaactcgggtggagataaaa

SEQ ID NO: 231 - protein, 120 aa, Artificial Sequence
  Synthesized
EVQLVESGGGLVQPGGSLRLSCAASGFTISTNAMSWVRQAPGKGLEWVGVITGRDITYYASWAKGRFTISRDTSKNTVYLQMNSLRAEDTAVYYCARDGGSSAITSNNIWGQGTLVTVSS

SEQ ID NO: 232 - DNA, 360 bp, Artificial Sequence
  Synthesized
gaagtccaattggtagaaagtggcggtggtctggtgcaacctggtggatctcttcgcctctcatgcgccgctagtggctttactatttcaactaatgcgatgagctgggttcgccaggcccccggcaaaggacttgagtgggtcggcgtcatcaccggcagggacattacatactatgcgagttgggcaaagggcaggttcacgattagccgcgatacttcaaagaataccgtttaccttcaaatgaatagcttgagggcggaagacacagctgtgtattactgcgcgagggatggaggtagttccgccataacttccaacaacatatggggacaaggcacgctggttactgtctcgagt

SEQ ID NO: 233 - protein, 112 aa, Artificial Sequence
  Synthesized
EIVMTQSPSTLSASVGDRVIITCQASESISSWLAWYQQKPGKAPKLLIYEASKLASGVPSRFSGSGSGAEFTLTISSLQPDDFATYYCQGYFYFISRTYVNSFGQGTKLTVL

SEQ ID NO: 234 - DNA, 336 bp, Artificial Sequence
  Synthesized
gaaatcgttatgacgcagagtccctccacgctctccgctagtgtcggggatcgcgtcattatcacatgccaggcctccgagtcaatcagcagctggcttgcatggtatcaacagaagccgggaaaagctcctaaattgctgatctatgaagcgtcaaaattggcgtctggtgtcccatctaggttctccggctctgggtctggtgcggaatttactttgacaatctccagtcttcaaccagacgatttcgctacctactactgccaagggtatttctattttataagccggacatatgtaaactccttcggccaaggaacaaagttgactgttctt

SEQ ID NO: 235 - protein, 118 aa, Artificial Sequence
  Synthesized
QQLLESGGRLIKPGATLRLTCKTSGFTISTNAMSWVRQPPGKGLEWIGVITGRDITYYASWAKGRFTISKTSINTVFLQMRSLRAEDTAVYYCARDGGSSAITSNNIWGRGTLVTVSS

SEQ ID NO: 236 - DNA, 354 bp, Artificial Sequence
  Synthesized
cagcagctgctggaaagcggcggccgcctgattaaaccgggcgcgaccctgcgcctgacctgcaaaaccagcggctttaccattagcaccaacgcgatgagctgggtgcgccagccgccgggcaaaggcctggaatggattggcgtgattaccggccgcgatattacctattatgcgagctgggcgaaaggccgctttaccattagcaaaaccagcattaacaccgtgtttctgcagatgcgcagcctgcgcgcggaagataccgcggtgtattattgcgcgcgcgatggcggcagcagcgcgattaccagcaacaacatttggggccgcggcaccctggtgaccgtgagcagc

SEQ ID NO: 237 - protein, 112 aa, Artificial Sequence
  Synthesized
DVQMTQSPSTLSATVGQRVTINCQASESISSWLAWYQQKPGQPPKLLIYEASKLASGVPSRFSGSGSGTEFTLTISSLQSDDFATYYCQGYFYFISRTYVNSFGGGTRVEIK

SEQ ID NO: 238 - DNA, 336 bp, Artificial Sequence
  Synthesized
gatgtgcagatgacccagagcccgagcaccctgagcgcgaccgtgggccagcgcgtgaccattaactgccaggcgagcgaaagcattagcagctggctggcgtggtatcagcagaaaccgggccagccgccgaaactgctgatttatgaagcgagcaaactggcgagcggcgtgccgagccgctttagcggcagcggcagcggcaccgaatttaccctgaccattagcagcctgcagagcgatgattttgcgacctattattgccagggctatttttattttattagccgcacctatgtgaacagctttggcggcggcacccgcgtggaaattaaa

SEQ ID NO: 239 - protein, 118 aa, Artificial Sequence
  Synthesized
QQLVESGGGLVKPGGSLRLSCAASGFTISTNAMSWVRQAPGKGLEWVGVITGRDITYYASWAKGRFTISKTSKNTVYLQMNSLRAEDTAVYYCARDGGSSAITSNNIWGQGTLVTVSS

SEQ ID NO: 240 - DNA, 354 bp, Artificial Sequence
  Synthesized
cagcagctggtggaaagcggcggcggcctggtgaaaccgggcggcagcctgcgcctgagctgcgcggcgagcggctttaccattagcaccaacgcgatgagctgggtgcgccaggcgccgggcaaaggcctggaatgggtgggcgtgattaccggccgcgatattacctattatgcgagctgggcgaaaggccgctttaccattagcaaaaccagcaaaaacaccgtgtatctgcagatgaacagcctgcgcgcggaagataccgcggtgtattattgcgcgcgcgatggcggcagcagcgcgattaccagcaacaacatttggggccagggcaccctggtgaccgtgagcagc

SEQ ID NO: 241 - protein, 112 aa, Artificial Sequence
  Synthesized
DVVMTQSPSSLSASVGDRVTISCQASESISSWLAWYQQKPGQAPKLLIYEASKLASGVPSRFSGSGSGTEFTLTISSLEPEDFATYYCQGYFYFISRTYVNSFGGGTKVEIK

SEQ ID NO: 242 - DNA, 336 bp, Artificial Sequence
  Synthesized
gatgtggtgatgacccagagcccgagcagcctgagcgcgagcgtgggcgatcgcgtgaccattagctgccaggcgagcgaaagcattagcagctggctggcgtggtatcagcagaaaccgggccaggcgccgaaactgctgatttatgaagcgagcaaactggcgagcggcgtgccgagccgctttagcggcagcggcagcggcaccgaatttaccctgaccattagcagcctggaaccggaagattttgcgacctattattgccagggctatttttattttattagccgcacctatgtgaacagctttggcggcggcaccaaagtggaaattaaa

SEQ ID NO: 243 - protein, 122 aa, Artificial Sequence
  Synthesized
EVQLLESGGGLVQPGGSLSLSCAASGFSFSSGYDMCWVRQAPGKGLEWIACIAAGSAGITYDANWAKGRFTISRDNSKNTLYLQMNSLRAEDTAVYYCARSAFSFDYAMDLWGQGTLVTVSS

SEQ ID NO: 244 - DNA, 369 bp, Artificial Sequence
  Synthesized
gaagtgcaattgctcgaaagtggtggcggacttgtgcaacctggtggaagcctctcactctcttgcgcggcgagtggttttagcttcagtagcggctacgatatgtgctgggtaagacaggctcctggtaaaggccttgagtggattgcgtgtatcgccgccgggtctgctggtataacatacgatgcaaactgggcgaaagggcgcttcacaatctccagggacaactcaaaaaatacattgtacctccagatgaatagcctgagagccgaagacaccgcagtctactattgcgcaaggtcagcatttagcttcgattatgcaatggatctttggggccaggggacgctcgtcaccgtctcatcttga

SEQ ID NO: 245 - protein, 110 aa, Artificial Sequence
  Synthesized
DIQMTQSPSTLSASVGDRVTITCQASQSISSHLNWYQQKPGKAPKLLIYKASTLASGVPSRFSGSGSGTEFTLTISSLQPDDFATYYCQQGYSWGNVDNVFGGGTKVTVL

SEQ ID NO: 246 - DNA, 330 bp, Artificial Sequence
  Synthesized
gacattcagatgacacagtcaccgtctacgctctcagcctcagtaggcgatagggtgactatcacctgccaagcctcccaatctataagttcacacctcaactggtatcaacagaaacccggtaaagcaccgaagctgctcatctacaaggcatcaactcttgcctcaggtgtgcctagtcgcttctccgggagcggctccggtactgagtttactttgacgatatcttccctccaacccgacgacttcgccacatactattgtcagcagggttatagttggggaaatgttgacaatgtgtttggagggggaacgaaagtgactgtgttg

SEQ ID NO: 247 - protein, 116 aa, Artificial Sequence
  Synthesized
EVQLVESGGGLVQPGGSLRLSCTASGFTISSYHMQWVRQAPGKGLEYIGTISSGGNVYYASSARGRFTISRPSSKNTVDLQMNSLRAEDTAVYYCARDSGYSDPMWGQGTLVTVSS

SEQ ID NO: 248 - DNA, 348 bp, Artificial Sequence
  Synthesized
gaggttcagttggttgaaagtggggggggactcgttcagcctggaggctctttgcgactttcttgtaccgcttctgggttcactataagttcatatcatatgcaatgggtaagacaggcgcctggtaagggacttgaatacataggaacaataagctctggtggtaacgtctattacgcctcatccgcgcgggggaggtttacaatttccaggccttctagcaaaaacacggtagatctgcaaatgaactctcttcgcgctgaagatacagcagtctactactgcgccagggattcagggtattctgaccccatgtgggggcagggcacattggttaccgtgtcctct

SEQ ID NO: 249 - protein, 111 aa, Artificial Sequence
  Synthesized
DVVMTQSPSSVSASVGDRVTITCQASQNIRTYLSWYQQKPGKAPKLLIYAAANLASGVPSRFSGSGSGTDFTLTISDLEPGDAATYYCQSTYLGTDYVGGAFGGGTKLTVL

SEQ ID NO: 250 - DNA, 333 bp, Artificial Sequence
  Synthesized
gacgttgtgatgacgcagtctcctagttcagtatcagcgtctgttggggatcgagtcacgattacatgccaggcgagccaaaatattaggacgtatctgtcttggtatcaacaaaagcctggtaaggctccaaaactcctcatttacgccgctgccaacttggctagtggagtaccttcacgctttagtgggtcaggttctggaacagattttacgttgacgatctccgatttggaaccaggggacgctgccacgtattattgccagtccacctacctcgggactgactacgttggtggggcgtttggcggaggaacaaaactcactgtactt

SEQ ID NO: 251 - protein, 562 aa, Artificial Sequence
  Synthesized
REGPELSPDDPAGLLDLRQGMFAQLVAQNVLLIDGPLSWYSDPGLAGVSLTGGLSYKEDTKELVVAKAGVYYVFFQLELRRVVAGEGSGSVSLALHLQPLRSAAGAAALALTVDLPPASSEARNSAFGFQGRLLHLSAGQRLGVHLHTEARARHAWQLTQGATVLGLFRVTPEIPAGLGSTGSGSKPGSGEGSTKGREGPELSPDDPAGLLDLRQGMFAQLVAQNVLLIDGPLSWYSDPGLAGVSLTGGLSYKEDTKELVVAKAGVYYVFFQLELRRVVAGEGSGSVSLALHLQPLRSAAGAAALALTVDLPPASSEARNSAFGFQGRLLHLSAGQRLGVHLHTEARARHAWQLTQGATVLGLFRVTPEIPAGLGGGGSGGGGSREGPELSPDDPAGLLDLRQGMFAQLVAQNVLLIDGPLSWYSDPGLAGVSLTGGLSYKEDTKELVVAKAGVYYVFFQLELRRVVAGEGSGSVSLALHLQPLRSAAGAAALALTVDLPPASSEARNSAFGFQGRLLHLSAGQRLGVHLHTEARARHAWQLTQGATVLGLFRVTPEIPAGL

SEQ ID NO: 252 - DNA, 1689 bp, Artificial Sequence
  Synthesized
cgagagggccccgagctgtctcctgatgacccagcaggcctcttggacttgcggcagggtatgttcgctcaacttgtggctcagaatgttctgctcattgatggaccactctcttggtatagtgaccccggtctggccggggtgagtctgaccggcgggctctcttataaagaggatactaaggaactggtcgtagcaaaagcgggcgtttattacgttttttttcagctggagctcaggcgcgtggtggccggcgagggcagtggctctgtgtccctggccctgcacttacagcccttgagaagcgctgcaggtgctgccgcactggctttaactgttgacctccctccggcctcttctgaagctagaaacagcgctttcggcttccaagggcgcctgctgcacctgagcgcaggccagcgcttaggtgtgcaccttcatacagaggccagggcccgacacgcttggcagctcacacagggtgccacggttctcggacttttccgcgttactcccgagatccccgctggcctcggaagtactggttctgggtctaaacccggttccggcgaaggtagtactaaaggacgagaagggccagagttaagtccagatgaccctgctgggcttttggacctgcggcagggcatgttcgctcaactggtggctcagaacgtgctgctgatcgatggccccctgagttggtacagcgatcccgggctggcaggcgtgtcacttacagggggcctctcttacaaggaagacaccaaggagttagtggtcgctaaggctggcgtgtattacgtgttcttccaactggagctgagaagggttgtggcaggagagggtagcggcagcgtgtctttagcccttcacttgcagcccctgaggtctgctgcaggtgcagccgctctcgcgctcaccgtggatctccccccagcctcatctgaagctaggaacagtgcatttggctttcagggacgcttgctgcacctctccgctggacagaggctgggcgtgcaccttcacacagaggcccgtgccaggcatgcatggcagctcactcagggggcaacagtgctgggtctcttccgcgtgactcctgaaataccagctggacttggcggtggaggcagcggcggaggaggatctcgtgaggggccagaactgtcccccgatgacccagccggactgctcgatctcagacagggcatgttcgctcagcttgtagcccaaaatgtcctcctgattgacggccctttgagctggtatagtgatcccggcttggccggggtatctctgaccggaggcctctcctacaaggaagacaccaaagagctggtggtggcaaaagcgggggtgtattatgtgttctttcagctcgagctgcggagagttgtggccggggaagggtctgggagcgtatctcttgcacttcacctgcagcccctgcgcagcgccgctggagccgccgcccttgctcttactgtggatctgcctcctgcttcctcagaagcacgcaacagcgccttcggctttcaaggacgtctcctgcacttgtccgcaggacagaggttgggcgtccatttacacactgaggcacgggcacggcacgcttggcagcttacccagggagccaccgtgctgggactctttagagtgacacccgagatccccgctggcttgtga

SEQ ID NO: 253 - protein, 298 aa, Artificial Sequence
  Synthesized
FLNSLFNQEVQIPLTESYCGPCPKNWICYKNNCYQFFDESKNWYESQASCMSQNASLLKVYSKEDQDLLKLVKSYHWMGLVHIPTNGSWQWEDGSILSPNLLTIIEMQKGDCALYASSFKGYIENCSTPNTYICMQRTVGGGGSGGGGSGGGGSGGGGSFLNSLFNQEVQIPLTESYCGPCPKNWICYKNNCYQFFDESKNWYESQASCMSQNASLLKVYSKEDQDLLKLVKSYHWMGLVHIPTNGSWQWEDGSILSPNLLTIIEMQKGDCALYASSFKGYIENCSTPNTYICMQRTV

SEQ ID NO: 254 - DNA, 894 bp, Artificial Sequence
  Synthesized
tttcttaattcccttttcaaccaagaggttcagatccccttgactgaaagctattgcggcccttgtccgaaaaactggatatgttacaagaataattgttaccaattcttcgacgaaagcaagaactggtatgagagtcaggcgtcttgtatgagtcagaatgccagcctgcttaaggtttattcaaaagaagaccaggatctgcttaagttggtaaagagctaccactggatggggctggtacatatcccaacgaatgggtcatggcagtgggaggacggttctattctgagtccaaatctcctgacgatcatcgaaatgcagaaaggggactgtgccctgtatgcatcatccttcaaggggtacatcgagaactgcagtaccccaaatacctacatttgtatgcaaagaacggttggaggcggtggctcaggcggaggcggctcaggaggtggcggttcaggaggcggcggatctttcctaaactcattattcaaccaagaagttcaaattcccttgaccgaaagttactgtggcccatgtcctaaaaactggatatgttacaaaaataactgctaccaattttttgatgagagtaaaaactggtatgagagccaggcttcttgtatgtctcaaaatgccagccttctgaaagtatacagcaaagaggaccaggatttacttaaactggtgaagtcatatcattggatgggactagtacacattccaacaaatggatcttggcagtgggaagatggctccattctctcacccaacctactaacaataattgaaatgcagaagggagactgtgcactctatgcctcgagctttaaaggctatatagaaaactgttcaactccaaatacgtacatctgcatgcaaaggactgtg

SEQ ID NO: 255 - protein, 118 aa, Artificial Sequence
  Synthesized
QVQLQESGGGLVKPGGSLSLSCAASGFTFSSYWMSWVRQAPGKGLEWVANINRDGSASYYVDSVKGRFTISRDDAKNSLYLQMNSLRAEDTAVYYCARDRGVGYFDLWGRGTLVTVSS

SEQ ID NO: 256 - DNA, 354 bp, Artificial Sequence
  Synthesized
caggtgcaattgcaggagtcggggggaggcctggtcaagcctggagggtccctgagcctctcctgtgcagcctctggattcacctttagtagttattggatgagctgggtccgccaggctccagggaaggggctggagtgggtggccaacataaaccgcgatggaagtgcgagttactatgtggactctgtgaagggccgattcaccatctccagagacgacgccaagaactcactgtatctgcaaatgaacagcctgagagctgaggacacggctgtgtattactgtgcgagagatcgtggggtgggctacttcgatctctggggccgtggcaccctggtcaccgtctcgagt

SEQ ID NO: 257 - protein, 111 aa, Artificial Sequence
  Synthesized
QSALTQPASVSGSPGQSITISCTGTSSDVGGYNFVSWYQQHPGKAPKLMIYDVSDRPSGVSDRFSGSKSGNTASLIISGLQADDEADYYCSSYGSSSTHVIFGGGTKVTVL

SEQ ID NO: 258 - DNA, 333 bp, Artificial Sequence
  Synthesized
cagtctgccctgactcagcctgcctccgtgtctgggtctcctggacagtcgatcaccatctcctgcactggaaccagcagtgacgttggtggttataactttgtctcctggtaccaacaacacccaggcaaagcccccaaactcatgatctatgatgtcagtgatcggccctcaggggtgtctgatcgcttctccggctccaagtctggcaacacggcctccctgatcatctctggcctccaggctgacgacgaggctgattattactgcagctcatatgggagcagcagcactcatgtgattttcggcggagggaccaaggtgaccgtccta

SEQ ID NO: 259 - protein, 121 aa, Artificial Sequence
  Synthesized
QVQLQQPGAELVKPGASVKMSCKASGYTFTSYNMHWVKQTPGRGLEWIGAIYPGNGDTSYNQKFKGKATLTADKSSSTAYMQLSSLTSEDSAVYYCARSTYYGGDWYFNVWGAGTTVTVSS

SEQ ID NO: 260 - DNA, 363 bp, Artificial Sequence
  Synthesized
caggtgcagctgcagcagcccggcgccgagctggtgaagcccggcgccagcgtgaagatgagctgcaaggccagcggctacaccttcaccagctacaacatgcactgggtgaagcagacccccggccggggcctggagtggatcggcgccatctaccccggcaacggcgacaccagctacaaccagaagttcaagggcaaggccaccctgaccgccgacaagagcagcagcaccgcctacatgcagctgagcagcctgaccagcgaggacagcgccgtgtactactgcgcccggagcacctactacggcggcgactggtacttcaacgtgtggggcgccggcaccaccgtgaccgtctcgagc

SEQ ID NO: 261 - protein, 106 aa, Artificial Sequence
  Synthesized
QIVLSQSPAILSASPGEKVTMTCRASSSVSYIHWFQQKPGSSPKPWIYATSNLASGVPVRFSGSGSGTSYSLTISRVEAEDAATYYCQQWTSNPPTFGGGTKLTVL

SEQ ID NO: 262 - DNA, 318 bp, Artificial Sequence
  Synthesized
cagatcgtgctgagccagagccccgccatcctgagcgccagccccggcgagaaggtgaccatgacctgccgggccagcagcagcgtgagctacatccactggttccagcagaagcccggcagcagccccaagccctggatctacgccaccagcaacctggccagcggcgtgcccgtgcggttcagcggcagcggcagcggcaccagctacagcctgaccatcagccgggtggaggccgaggacgccgccacctactactgccagcagtggaccagcaacccccccaccttcggcggcggcaccaagctgaccgtgctg

SEQ ID NO: 263 - protein, 124 aa, Artificial Sequence
  Synthesized
EVQLQESGGGLVQAGDSLSLSCLVSGRSFNSYTMGWFRQAPGKEREFVAAILWSGPTTYYADSVKGRFTISRDNAKNTVYLQMNSLKPEDTAVYYCAAALGVLVLAPGNVYSYWGQGTQVTVSS

SEQ ID NO: 264 - DNA, 372 bp, Artificial Sequence
  Synthesized
gaggtgcagctgcaggagtctggcggcggcctggtgcaggctggggacagcctgagcctgtcctgcctggtgtctggccgctccttcaactcctacaccatgggctggttccgccaggcccctgggaaggagcgggagtttgtggctgccatcctgtggagtggccccaccacctactatgctgactctgtgaagggccgcttcaccatctccagagacaatgccaagaacactgtgtacctgcagatgaacagcctgaagccagaggacacagctgtgtactactgtgctgctgccctgggagtgctggtgctggcccctggcaatgtgtacagctactggggccagggcacccaggtgactgtctcgagc

SEQ ID NO: 265 - protein, 127 aa, Artificial Sequence
  Synthesized
QVQLVQSGGGLVQAGGSLSLSCAFSGRTFSMYTMGWFRQAPGKEREFVAANRGRGLSPDIADSVNGRFTISRDNAKNTLYLQMDSLKPEDTAVYYCAADLQYGSSWPQRSSAEYDYWGQGTTVTVSS

SEQ ID NO: 266 - DNA, 381 bp, Artificial Sequence
  Synthesized
caggtgcagctggtgcagtctggcggaggcctggtgcaggctgggggcagcctgagcctgagctgtgccttctctggccgcaccttctccatgtacaccatgggctggttccgccaggccccagggaaggagagagagtttgtggctgccaacagaggcagaggcctgagcccagacattgctgactctgtgaatggccgcttcaccatctccagagacaatgccaagaacaccctgtacctgcagatggacagcctgaagccagaggacacagctgtgtactactgtgctgctgacctgcagtatggcagcagctggcctcagaggagctctgctgagtatgactactggggccagggcaccactgtgactgtctcgagc

SEQ ID NO: 267 - protein, 122 aa, Artificial Sequence
  Synthesized
EVQLLESGGGLVQPGGSLRLSCAASGFSFSSGYDMCWVRQAPGKCLEWIACIAAGSAGITYDANWAKGRFTISRDNSKNTLYLQMNSLRAEDTAVYYCARSAFSFDYAMDLWGQGTLVTVSS

SEQ ID NO: 268 - DNA, 366 bp, Artificial Sequence
  Synthesized
gaggtgcagctgttggagtctgggggaggcttggtacagcctggggggtccctgagactctcctgtgcagcctctggattctccttcagtagcgggtacgacatgtgctgggtccgccaggctccagggaagtgcctggagtggatcgcatgcattgctgctggtagtgctggtatcacttacgacgcgaactgggcgaaaggccggttcaccatctccagagacaattccaagaacacgctgtatctgcaaatgaacagcctgagagccgaggacacggccgtatattactgtgcgagatcggcgttttcgttcgactacgccatggacctctggggccagggaaccctggtcaccgtctcgtct

SEQ ID NO: 269 - protein, 110 aa, Artificial Sequence
  Synthesized
DIQMTQSPSTLSASVGDRVTITCQASQSISSHLNWYQQKPGKAPKLLIYKASTLASGVPSRFSGSGSGTEFTLTISSLQPDDFATYYCQQGYSWGNVDNVFGCGTKVEIK

SEQ ID NO: 270 - DNA, 333 bp, Artificial Sequence
  Synthesized
gacatccagatgacccagtctccttccaccctgtctgcatctgtaggagacagagtcaccatcacttgccaggccagtcagagcattagttcccacttaaactggtatcagcagaaaccagggaaagcccctaagctcctgatctataaggcatccactctggcatctggggtcccatcaaggttcagcggcagtggatctgggacagaatttactctcaccatcagcagcctgcagcctgatgattttgcaacttattactgccaacagggttatagttggggtaatgttgataatgttttcggctgcgggaccaaggtggagatcaaatag

SEQ ID NO: 271 - protein, 115 aa, Artificial Sequence
  Synthesized
RSLVESGGGLVQPGGSLRLSCTASGFTISSYHMQWVRQAPGKCLEYIGTISSGGNVYYASSARGRFTISRPSSKNTVDLQMNSLRAEDTAVYYCARDSGYSDPMWGQGTLVTVSS

SEQ ID NO: 272 - DNA, 345 bp, Artificial Sequence
  Synthesized
cggtcgctggtggagtctgggggaggcttggtccagcctggggggtccctgagactctcctgtactgcctctggattcaccatcagtagctaccacatgcagtgggtccggcaggcacctgggaagtgcctggagtacatcggaaccattagtagtggtggtaatgtatactacgcaagctccgctagaggcagattcaccatctccagaccctcgtccaagaacacggtggatcttcaaatgaacagcctgagagccgaggacacggctgtgtattactgtgcgagagactctggttatagtgatcctatgtggggccagggaaccctggtcaccgtctcttca

SEQ ID NO: 273 - protein, 111 aa, Artificial Sequence
  Synthesized
DVVMTQSPSSVSASVGDRVTITCQASQNIRTYLSWYQQKPGKAPKLLIYAAANLASGVPSRFSGSGSGTDFTLTISDLEPGDAATYYCQSTYLGTDYVGGAFGCGTKVEIK

SEQ ID NO: 274 - DNA, 336 bp, Artificial Sequence
  Synthesized
gacgttgtgatgacccagtctccatcttccgtgtctgcatctgtaggagacagagtcaccatcacctgtcaggccagtcagaacattaggacttacttatcctggtatcagcagaaaccagggaaagcccctaagctcctgatctatgctgcagccaatctggcatctggggtcccatcaaggttcagcggcagtggatctgggacagatttcactctcaccatcagcgacttggaacctggcgatgctgcaacttactattgtcagtctacctatcttggtactgattatgttggcggtgctttcggctgtgggaccaaggtggagatcaaatga

SEQ ID NO: 275 - protein, 118 aa, Artificial Sequence
  Synthesized
QVQLQESGGGLVKPGGSLRLSCAASGFTFSSYWMSWVRQAPGKCLEWVANINRDGSASYYVDSVKGRFTISRDDAKNSLYLQMNSLRAEDTAVYYCARDRGVGYFDLWGRGTLVTVST

SEQ ID NO: 276 - DNA, 354 bp, Artificial Sequence
  Synthesized
caggtgcaattgcaggagtcggggggaggcctggtcaagcctggagggtccctgagactctcctgtgcagcctctggattcacctttagtagttattggatgagctgggtccgccaggctccagggaagtgcctggagtgggtggccaacataaaccgcgatggaagtgcgagttactatgtggactctgtgaagggccgattcaccatctccagagacgacgccaagaactcactgtatctgcaaatgaacagcctgagagctgaggacacggctgtgtattactgtgcgagagatcgtggggtgggctacttcgatctctggggccgtggcaccctggtcaccgtgtcgaca

SEQ ID NO: 277 - protein, 111 aa, Artificial Sequence
  Synthesized
QSALTQPASVSGSPGQSITISCTGTSSDVGGYNFVSWYQQHPGKAPKLMIYDVSDRPSGVSDRFSGSKSGNTASLIISGLQADDEADYYCSSYGSSSTHVIFGCGTKVTVL

SEQ ID NO: 278 - DNA, 333 bp, Artificial Sequence
  Synthesized
cagtctgccctgactcagcctgcctccgtgtctgggtctcctggacagtcgatcaccatctcctgcactggaaccagcagtgacgttggtggttataactttgtctcctggtaccaacaacacccaggcaaagcccccaaactcatgatctatgatgtcagtgatcggccctcaggggtgtctgatcgcttctccggctccaagtctggcaacacggcctccctgatcatctctggcctccaggctgacgacgaggctgattattactgcagctcatatgggagcagcagcactcatgtgattttcggctgtgggaccaaggtgaccgtccta

SEQ ID NO: 279 - protein, 122 aa, Artificial Sequence
  Synthesized
EVQLVESGGGLVQPGGSLRLSCAASGFSFSGTQYVCWVRQAPGKGLEWIGCIYVDVANTYYATSVKGRFTISRDNSKNTLYLQMNSLRAEDTAVYYCASHDTVCAGCGLDLWGQGTLVTVSS

SEQ ID NO: 280 - DNA, 366 bp, Artificial Sequence
  Synthesized
gaggtgcagctggtggagtctgggggaggcttggtccagcctggggggtccctgagactctcctgtgcagcctctggattctccttcagtggcacccagtacgtgtgctgggtccgccaggctccagggaaggggctggagtggatcggatgcatttatgtggatgtggctaacacttactacgcgacctccgtgaagggcagattcaccatctccagagacaattccaagaacacgctgtatcttcaaatgaacagcctgagagccgaggacacggctgtgtattactgtgcgagtcatgatactgtttgtgctggttgtggtttggacttgtggggccagggaaccctggtcaccgtctcgagc

SEQ ID NO: 281 - protein, 111 aa, Artificial Sequence
  Synthesized
DIQMTQSPSTLSASVGDRVTITCQASENIYSNLAWYQQKPGKAPKLLIYDASTLASGVPSRFSGSGSGTEFTLTISSLQPDDFATYYCQSTYYNNIIYGAAFGGGTKVEIK

SEQ ID NO: 282 - DNA, 333 bp, Artificial Sequence
  Synthesized
gacatccagatgacccagtctccttccaccctgtctgcatctgtaggagacagagtcaccatcacttgccaggccagtgagaacatttacagcaatttagcctggtatcagcagaaaccagggaaagcccctaagctcctgatctatgatgcttccactctggcatctggggtcccatcaaggttcagcggcagtggatctgggacagaattcactctcaccatcagcagcctgcagcctgatgattttgcaacttattactgccaatctacttattataataatatcatttatggggctgctttcggcggagggaccaaggtggagatcaaa

SEQ ID NO: 283 - protein, 120 aa, Artificial Sequence
  Synthesized
EVQLVESGGGLVQPGGSLRLSCAASGFNIKDTYIHWVRQAPGKGLEWVARIYPTNGYTRYADSVKGRFTISADTSKNTAYLQMNSLRAEDTAVYYCSRWGGDGFYAMDYWGQGTLVTVST

SEQ ID NO: 284 - DNA, 360 bp, Artificial Sequence
  Synthesized
gaagtacagcttgttgagagtggtggtggacttgtccaaccagggggaagtctgcggctgtcatgcgcagcctctggcttcaacattaaggacacctacattcactgggttcggcaagcgccggggaaggggctggaatgggtcgccaggatataccctaccaacgggtacaccaggtatgcagatagcgttaagggtagattcactatttcagctgacactagcaagaacaccgcgtatctccagatgaactcccttcgcgccgaggatacggctgtgtactactgctctaggtggggaggagatgggttttacgcaatggattactggggacagggaacactcgttacggtgtcgaca

SEQ ID NO: 285 - protein, 107 aa, Artificial Sequence [sequence omitted]

SEQ ID NO: 286 - DNA, 321 bp, Artificial Sequence
  Synthesized
gacatccaaatgacgcagtctccctccagtttgagtgcaagtgtgggagacagagttacgatcacatgtagggcaagtcaggacgtcaatacagccgtcgcatggtaccagcagaagcctggaaaggccccgaaacttctgatttactctgcaagtttcctctacagtggtgttcctagtcgcttcagtgggtctcggtcaggcaccgattttaccctgacaattagcagcttgcaaccggaagattttgcgacctattattgccagcaacattataccacccctcccacatttggacaaggcacgaaggtagagattaaa

SEQ ID NO: 287 - protein, 451 aa, Artificial Sequence
  Synthesized
EVQLVESGGGLVQPGGSLRLSCAASGFSFSGTQYVCWVRQAPGKGLEWIGCIYVDVANTYYATSVKGRFTISRDNSKNTLYLQMNSLRAEDTAVYYCASHDTVCAGCGLDLWGQGTLVTVSSASTKGPSVFPLAPSSKSTSGGTAALGCLVKDYFPEPVTVSWNSGALTSGVHTFPAVLQSSGLYSLSSVVTVPSSSLGTQTYICNVNHKPSNTKVDKRVEPKSCDKTHTCPPCPAPEAAGAPSVFLFPPKPKDTLMISRTPEVTCVVVDVSHEDPEVKFNWYVDGVEVHNAKTKPREEQYNSTYRVVSVLTVLHQDWLNGKEYKCAVSNKALPAPIEKTISKAKGQPREPQVYTLPPSRDELTKNQVSLTCLVKGFYPSDIAVEWESNGQPENNYKTTPPVLDSDGSFFLYSKLTVDKSRWQQGNVFSCSVMHEALHNHYTQKSLSLSPG

SEQ ID NO: 288 - DNA, 1356 bp, Artificial Sequence
  Synthesized
gaggtgcagctggtggagtctgggggaggcttggtccagcctggggggtccctgagactctcctgtgcagcctctggattctccttcagtggcacccagtacgtgtgctgggtccgccaggctccagggaaggggctggagtggatcggatgcatttatgtggatgtggctaacacttactacgcgacctccgtgaagggcagattcaccatctccagagacaattccaagaacacgctgtatcttcaaatgaacagcctgagagccgaggacacggctgtgtattactgtgcgagtcatgatactgtttgtgctggttgtggtttggacttgtggggccagggaaccctggtcaccgtctcgagcgctagcaccaagggcccatcggtcttccccctggcaccctcctccaagagcacctctgggggcacagcggccctgggctgcctggtcaaggactacttccccgaaccggtgacggtgtcgtggaactcaggcgccctgaccagcggcgtgcacaccttcccggctgtcctacagtcctcaggactctactccctcagcagcgtggtgaccgtgccctccagcagcttgggcacccagacctacatctgcaacgtgaatcacaagcccagcaacaccaaggtggacaagagagttgagcccaaatcttgtgacaaaactcacacatgcccaccgtgcccagcacctgaagccgcgggggcaccgtcagtcttcctcttccccccaaaacccaaggacaccctcatgatctcccggacccctgaggtcacatgcgtggtggtggacgtgagccacgaagaccctgaggtcaagttcaactggtacgtggacggcgtggaggtgcataatgccaagacaaagccgcgggaggagcagtacaacagcacgtaccgtgtggtcagcgtcctcaccgtcctgcaccaggactggctgaatggcaaggagtacaagtgcgcggtctccaacaaagccctcccagcccccatcgagaaaaccatctccaaagccaaagggcagccccgagaaccacaggtgtacaccctgcccccatcccgggatgagctgaccaagaaccaggtcagcctgacctgcctggtcaaaggcttctatcccagcgacatcgccgtggagtgggagagcaatgggcagccggagaacaactacaagaccacgcctcccgtgctggactccgacggctccttcttcctctatagcaagctcaccgtggacaagagcaggtggcagcaggggaacgtcttctcatgctccgtgatgcatgaggctctgcacaaccactacacgcagaagagcctctccctgtctccgggttaa

SEQ ID NO: 289 - protein, 218 aa, Artificial Sequence
  Synthesized
DIQMTQSPSTLSASVGDRVTITCQASENIYSNLAWYQQKPGKAPKLLIYDASTLASGVPSRFSGSGSGTEFTLTISSLQPDDFATYYCQSTYYNNIIYGAAFGGGTKVEIKRTVAAPSVFIFPPSDEQLKSGTASVVCLLNNFYPREAKVQWKVDNALQSGNSQESVTEQDSKDSTYSLSSTLTLSKADYEKHKVYACEVTHQGLSSPVTKSFNRGEC

SEQ ID NO: 290 - DNA, 657 bp, Artificial Sequence
  Synthesized
gacatccagatgacccagtctccttccaccctgtctgcatctgtaggagacagagtcaccatcacttgccaggccagtgagaacatttacagcaatttagcctggtatcagcagaaaccagggaaagcccctaagctcctgatctatgatgcttccactctggcatctggggtcccatcaaggttcagcggcagtggatctgggacagaattcactctcaccatcagcagcctgcagcctgatgattttgcaacttattactgccaatctacttattataataatatcatttatggggctgctttcggcggagggaccaaggtggagatcaaacgtacggtggctgcaccatctgtcttcatcttcccgccatctgatgagcagttgaaatctggaactgcctctgttgtgtgcctgctgaataacttctatcccagagaggccaaagtacagtggaaggtggataacgccctccaatcgggtaactcccaggagagtgtcacagagcaggacagcaaggacagcacctacagcctcagcagcaccctgacgctgagcaaagcagactacgagaaacacaaagtctacgcctgcgaagtcacccatcagggcctgagctcgcccgtcacaaagagcttcaacaggggagagtgttag

SEQ ID NO: 291 - protein, 112 aa, Artificial Sequence
  Synthesized
QQLVESGGGLVKPGGSLRLSCAASGIDLSSNAIGWVRQAPGKGLEWVGVIFGSGNTYYASWAKGRFTISRSKNTVYLQMNSLRAEDTAVYYCARGGYSSDIWGQGTLVTVSS

SEQ ID NO: 292 - DNA, 336 bp, Artificial Sequence
  Synthesized
caacagttggttgagtctggtggcggtctcgttaagcctggagggtcccttcggcttagttgtgcggcctctgggatcgacctgtctagcaacgctataggatgggtacggcaagctccgggcaaaggccttgagtgggtcggcgttatttttgggagcggtaatacgtactacgccagctgggcaaaaggtaggttcactatcagtcgatcaaagaacacggtatatcttcagatgaacagtctccgggcggaggacaccgcggtttattattgcgcaagggggggatactcctcagacatatggggccaaggtactttggtgacggtctcgagc

SEQ ID NO: 293 - protein, 110 aa, Artificial Sequence
  Synthesized
DPVLTQSPSSLSASVGDRVTISCQSSQSVAKNNNLAWFQQKPGQAPKLLIYSASTLAAGVPSRFSGSGSGTDFTLTISSVQPEDFATYYCSARDSGNIQSFGGGTKVEIK

SEQ ID NO: 294 - DNA, 330 bp, Artificial Sequence
  Synthesized
gatccagttctgacacaaagtccatccagcctgtctgcctcagtcggcgacagagtgaccatcagttgccagagctcacagtctgtggctaagaacaacaacttggcgtggttccaacagaaacctggacaggctccgaaattgctgatctattctgcttccacgcttgctgctggtgttccttcccgcttttcaggtagtggtagcgggacagacttcactttgactataagcagcgtgcagcctgaagattttgcgacctactattgttctgctagagacagtggaaatattcagtcctttggggggggaacgaaggtcgaaataaag

SEQ ID NO: 295 - protein, 139 aa, Artificial Sequence
  Synthesized
FLNSLFNQEVQIPLTESYCGPCPKNWICYKNNCYQFFDESKNWYESQASCMSQNASLLKVYSKEDQDLLKLVKSYHWMGLVHIPTNGSWQWEDGSILSPNLLTIIEMQKGDCALYASSFKGYIENCSTPNTYICMQRTV

SEQ ID NO: 296 - DNA, 417 bp, Artificial Sequence
  Synthesized
tttctgaatagcctgttcaaccaggaggtgcagatcccactgaccgagagctattgtggaccttgtcctaagaactggatctgttacaagaacaactgctaccagttcttcgacgagagcaagaattggtatgaaagccaggccagctgcatgagccaaaacgcctctctgctgaaggtgtactccaaagaagatcaggacctgctgaagctggtgaagtcctaccactggatgggcctggtgcacatcccaaccaacggcagctggcagtgggaagacggcagcatcctgagccctaacctgctgacaatcattgagatgcagaaaggcgactgcgccctgtacgccagttcttttaagggctacatcgaaaactgtagcacccctaacacctacatctgcatgcagagaacagtg

SEQ ID NO: 297 - protein, 439 aa, Artificial Sequence
  Synthesized
QVQLQESGGRLVQPGEPLSLTCKTSGIDLSSNAIGWVRQAPGKGLEWIGVIFGSGNTYYASWAKGRFTISRSTSTVYLKMNSLRSEDTAIYYCARGGYSSDIWGQGTLVTVSSASTKGPSVFPLAPCSRSTSESTAALGCLVKDYFPEPVTVSWNSGALTSGVHTFPAVLQSSGLYSLSSVVTVPSSSLGTKTYTCNVDHKPSNTKVDKRVESKYGPPCPPCPAPEAAGGPSVFLFPPKPKDTLMISRTPEVTCVVVDVSQEDPEVQFNWYVDGVEVHNAKTKPREEQFNSTYRVVSVLTVLHQDWLNGKEYKCKVSNKGLPSSIEKTISKAKGQPREPQVYTLPPSQEEMTKNQVSLSCAVKGFYPSDIAVEWESNGQPENNYKTTPPVLDSDGSFFLVSRLTVDKSRWQEGNVFSCSVMHEALHNHYTQKSLSLSLG

SEQ ID NO: 298 - DNA, 1320 bp, Artificial Sequence
  Synthesized
caagtgcagttgcaagaaagtggtggtagactggttcagcctggtgaacccttgtcactgacgtgtaaaacaagcggcattgatctgtcctctaacgccatcggatgggtccgacaggccccaggaaaaggtctggagtggatcggagttatcttcgggagcggcaatacatactacgcaagctgggcaaaagggcgatttacgatatcacggagcacctctacagtttatttgaaaatgaactccctccggtccgaggataccgcgatatattactgtgccagaggggggtactcctctgatatctgggggcagggtacactggttacagtttcatccgctagcaccaagggaccctctgtgtttcctctggctccttgctccagatccacctccgagtctacagctgctctgggctgcctggtcaaggactactttcctgagcctgtgaccgtgtcctggaactctggcgctctgacatctggcgtgcacacctttccagctgtgctgcagtcctccggcctgtactctctgtcctctgtcgtgaccgtgccttcctctagcctgggcaccaagacctacacctgtaatgtggaccacaagccttccaacaccaaggtggacaagcgcgtggaatctaagtacggccctccttgtcctccatgtcctgctccagaagctgctggcggcccatccgtgtttctgttccctccaaagcctaaggacaccctgatgatctctcggacccctgaagtgacctgcgtggtggtggatgtgtcccaagaggatcccgaggtgcagttcaattggtacgtggacggcgtggaagtgcacaacgccaagaccaagcctagagaggaacagttcaactccacctacagagtggtgtccgtgctgaccgtgctgcaccaggattggctgaacggcaaagagtacaagtgcaaggtgtccaacaagggcctgccttccagcatcgaaaagaccatctccaaggccaagggccagcctagggaaccccaggtttacaccctgcctccaagccaagaggaaatgaccaagaaccaggtgtccctgtcctgcgccgtgaagggcttctacccttccgatatcgccgtggaatgggagagcaatggccagcctgagaacaactacaagacaacccctcctgtgctggactccgacggctccttcttcctggtgtcccgcctgaccgtggacaagtccagatggcaagagggcaacgtgttctcctgctccgtgatgcacgaggccctgcacaatcactacacccagaagtccctgtctctgtccctgggatga

SEQ ID NO: 299 - protein, 702 aa, Artificial Sequence
  Synthesized
QSALTQPASVSGSPGQSITISCTGTSSDVGGYNFVSWYQQHPGKAPKLMIYDVSDRPSGVSDRFSGSKSGNTASLIISGLQADDEADYYCSSYGSSSTHVIFGGGTKVTVLGGGGSGGGGSGGGGSGGGGSQVQLQESGGGLVKPGGSLSLSCAASGFTFSSYWMSWVRQAPGKGLEWVANINRDGSASYYVDSVKGRFTISRDDAKNSLYLQMNSLRAEDTAVYYCARDRGVGYFDLWGRGTLVTVSSGGGGSGGGGSDPQLTQSPSSLSATVGQRVTINCQSSQSVAKNNNLAWFQQKPGKPPKLLIYSASTLAAGVPSRFSGSGSGTQFTLTITRVQSEDFATYYCSARDSGNIQSFGGGTRVEIKRTVAAPSVFIFPPSDEQLKSGTASVVCLLNNFYPREAKVQWKVDNALQSGNSQESVTEQDSKDSTYSLSSTLTLSKADYEKHKVYACEVTHQGLSSPVTKSFNRGECGGGPPCPPCPAPEAAGGPSVFLFPPKPKDTLMISRTPEVTCVVVDVSQEDPEVQFNWYVDGVEVHNAKTKPREEQFNSTYRVVSVLTVLHQDWLNGKEYKCKVSNKGLPSSIEKTISKAKGQPREPQVYTLPPSQEEMTKNQVSLWCLVKGFYPSDIAVEWESNGQPENNYKTTPPVLDSDGSFFLYSRLTVDKSRWQEGNVFSCSVMHEALHNRFTQKSLSLSLG

SEQ ID NO: 300 - DNA, 2109 bp, Artificial Sequence
  Synthesized
cagtctgccctgactcagcctgcctccgtgtctgggtctcctggacagtcgatcaccatctcctgcactggaaccagcagtgacgttggtggttataactttgtctcctggtaccaacaacacccaggcaaagcccccaaactcatgatctatgatgtcagtgatcggccctcaggggtgtctgatcgcttctccggctccaagtctggcaacacggcctccctgatcatctctggcctccaggctgacgacgaggctgattattactgcagctcatatgggagcagcagcactcatgtgattttcggcggagggaccaaggtgaccgtcctaggcggtggcggtagtgggggaggcggttctggcggcggagggtccggcggtggaggatcacaggtgcaattgcaggagtcggggggaggcctggtcaagcctggagggtccctgagcctctcctgtgcagcctctggattcacctttagtagttattggatgagctgggtccgccaggctccagggaaggggctggagtgggtggccaacataaaccgcgatggaagtgcgagttactatgtggactctgtgaagggccgattcaccatctccagagacgacgccaagaactcactgtatctgcaaatgaacagcctgagagctgaggacacggctgtgtattactgtgcgagagatcgtggggtgggctacttcgatctctggggccgtggcaccctggtcaccgtctcgagtggcggtggagggtccggcggtggtggatcagatcctcaattgacccagtcccctagtagcctttctgcaaccgtgggccagagggtaacaatcaattgccagtcaagccagtccgtagcgaagaataataatttggcatggttccaacaaaaaccgggtaaacctcctaaactccttatctactcagcttcaacccttgccgcgggtgtgcccagccggttctcaggctcaggttccgggactcaatttacacttaccatcactcgcgtccaaagtgaggattttgcaacctactattgttctgcacgggattccgggaacatacagtcctttgggggtggaactcgggtggagataaaacgtacggtggctgcaccatctgtcttcatcttcccgccatctgatgagcagttgaaatctggaactgcctctgttgtgtgcctgctgaataacttctatcccagagaggccaaagtacagtggaaggtggataacgccctccaatcgggtaactcccaggagagtgtcacagagcaggacagcaaggacagcacctacagcctcagcagcaccctgacgctgagcaaagcagactacgagaaacacaaagtctacgcctgcgaagtcacccatcagggcctgagctcgcccgtcacaaagagcttcaacaggggagagtgtggcggcggacctccttgtcctccatgtcctgctccagaagctgctggcggcccatccgtgtttctgttccctccaaagcctaaggacaccctgatgatctctcggacccctgaagtgacctgcgtggtggtggatgtgtcccaagaggatcccgaggtgcagttcaattggtacgtggacggcgtggaagtgcacaacgccaagaccaagcctagagaggaacagttcaactccacctacagagtggtgtccgtgctgaccgtgctgcaccaggattggctgaacggcaaagagtacaagtgcaaggtgtccaacaagggcctgccttccagcatcgaaaagaccatctccaaggccaagggccagcctagggaaccccaggtttacaccctgcctccaagccaagaggaaatgaccaagaaccaggtgtccctgtggtgcctcgtgaagggcttctacccttccgatatcgccgtggaatgggagagcaatggccagcctgagaacaactacaagacaacccctcctgtgctggactccgacggctccttcttcctgtattcccgcctgaccgtggacaagtccagatggcaagagggcaacgtgttctcctgctccgtgatgcacgaggccctgcacaatcgcttcacccagaagtccctgtctctgtccctgggatga

SEQ ID NO: 301 - protein, 6 aa, Artificial Sequence
  Synthesized
GTQYVC

SEQ ID NO: 302 - protein, 17 aa, Artificial Sequence
  Synthesized
CIYVDVANTYYATSVKG

SEQ ID NO: 303 - protein, 12 aa, Artificial Sequence
  Synthesized
HDTVCAGCGLDL

SEQ ID NO: 304 - protein, 11 aa, Artificial Sequence
  Synthesized
QASENIYSNLA

SEQ ID NO: 305 - protein, 7 aa, Artificial Sequence
  Synthesized
DASTLAS

SEQ ID NO: 306 - protein, 13 aa, Artificial Sequence
  Synthesized
QSTYYNNIIYGAA

SEQ ID NO: 307 - protein, 5 aa, Artificial Sequence
  synthesized
SNAIG

SEQ ID NO: 308 - protein, 16 aa, Artificial Sequence
  Synthesized
VIFGSGNTYYASWAKG

SEQ ID NO: 309 - protein, 7 aa, Artificial Sequence
  Synthesized
GGYSSDI

SEQ ID NO: 310 - protein, 13 aa, Artificial Sequence
  Synthesized
QSSQSVAKNNNLA

SEQ ID NO: 311 - protein, 7 aa, Artificial Sequence
  Synthesized
SASTLAA

SEQ ID NO: 312 - protein, 10 aa, Artificial Sequence
  Synthesized
SARDSGNIQS

SEQ ID NO: 313 - protein, 329 aa, Artificial Sequence
  Synthesized
ASTKGPSVFPLAPSSKSTSGGTAALGCLVKDYFPEPVTVSWNSGALTSGVHTFPAVLQSSGLYSLSSVVTVPSSSLGTQTYICNVNHKPSNTKVDKRVEPKSCDKTHTCPPCPAPELLGGPSVFLFPPKPKDTLMISRTPEVTCVVVDVSHEDPEVKFNWYVDGVEVHNAKTKPREEQYNSTYRVVSVLTVLHQDWLNGKEYKCKVSNKALPAPIEKTISKAKGQPREPQVYTLPPSRDELTKNQVSLTCLVKGFYPSDIAVEWESNGQPENNYKTTPPVLDSDGSFFLYSKLTVDKSRWQQGNVFSCSVMHEALHNHYTQKSLSLSPG

SEQ ID NO: 314 - protein, 326 aa, Artificial Sequence
  Synthesized
ASTKGPSVFPLAPCSRSTSESTAALGCLVKDYFPEPVTVSWNSGALTSGVHTFPAVLQSSGLYSLSSVVTVPSSSLGTKTYTCNVDHKPSNTKVDKRVESKYGPPCPSCPAPEFLGGPSVFLFPPKPKDTLMISRTPEVTCVVVDVSQEDPEVQFNWYVDGVEVHNAKTKPREEQFNSTYRVVSVLTVLHQDWLNGKEYKCKVSNKGLPSSIEKTISKAKGQPREPQVYTLPPSQEEMTKNQVSLTCLVKGFYPSDIAVEWESNGQPENNYKTTPPVLDSDGSFFLYSRLTVDKSRWQEGNVFSCSVMHEALHNHYTQKSLSLSLG
